United States Patent Application Publication US 2015/0376612 A1 - sequence listing, part 59

SEQ ID NO: 138688 - DNA, 1020 bp, Homo sapiens
gccaatagctctcgttgtgtccagccgagtgtttacgacatgctctatagtttgtggagcaaagaaagccctcccttgctaacttgaccctggggagacttgctcctctactcctagtgaccgacatgaccacttgcaagggaacttggcctccgtctgtccctgctaaatggtctggcagaattctcatcaggagagccagaagaaaattccataaggcttctcgcttcagttctgtaataacaaacccagctccctctccctgcctgccctgcttcctttgctcagtactgcccctaggctcagagacatcagggagtctcatattcagagcccaggttcttcaagtccataggctgctggttctgccctgcctttaaaatccatttccagtcaactggatttggatcttcttgtccccttgtgtctttgtctcactcactgtatctctgtctggccccctagcctgtccatagctaaccccctgcctcagttttctggctaatcgcccagttcctctaggagtaagttcttgccttgttgctggccttcctgaggaggggtgccttaccctcaccaggaccatatgactgagcccagcacagtggaactgtggattgaaggggtgagtttctctctttttttttttctggaaacagagtcttcccaggctggggtgcagtggtgcaatctcggctcactgaaacctctgcttcccgtgttcaagtgattctcctgcctcagcctcctgagtagctgggactacaggtgtacaccaccactcctggctaattttttgtatgtttagtagagacggggttttaccatgttggtcaggctggtctcgaactcctgacctcaagtgttccaactgcctcggcctcccaaagtgctcggattataggcgtgagccactgcacctggcctggaggggtgagtttctgcttagagaactcagaggagacaaagtgcctgggataacgcagtccagcaagtggccctgttgaggactggactagc

SEQ ID NO: 138689 - DNA, 1042 bp, Homo sapiens
gggagcagcagcatcattccagttgttaccaggtgcagttgagtaggcctactccaccttcatgtttcttgccccctcttggagaaataatgatatggtttggctgtgtacccacccaaaaatctcatcttgaattgtaatccccataatccccacgtcaatggtgggaacaagtggaggtaattggatcatgggggcagtttttctgcatgctgttctggtgatagtgaatgagtctcatgcatatctgatggttttttaaacgtctgacctttcccctgcctgcactcactccatcctgccaccctgtgaagagggtgcctgcttctcctttgccttctgcctggactgtaagtttcctgaggccccccccatcaatgctgaactgtgagtcaattaaacctctttcctttataaattacccagtctcaggcagttctttattaggagtatgaaaatggactaatacaaataatttggccagagttttgtgcacacgttcctgcggggtgaaacaagtcagagttgaccaccttgatggtaagcaaaaagttattgtcttgaaatatctagaaactgtaccattctcctacctcttgagagcgtgggggagattaacaatacccaaacccataaaaatgccaactctgtctgcactggcttcacattgccataaacacccagatttcctagaggggacttcatggcccttcatgtccaccagtaaggaccatcccacctttgaagtttcttctcccaccacacccttcctttgccctgtagtctagccacattgaaccatcacactttttcaaacacatttctatagtttctcacctacatacctttgtgcatgctgactcctcatccggggatgcccttacaagcccttccctgctaaagggaatcctatctgtccttcagggcttaggtcaaatggccatcttctccatggccaccatatttggagctaattgctccttctgcagccttacagcctcttactagttgcgttggcttcctgtggctgctgtaacaaatt

SEQ ID NO: 138690 - DNA, 1121 bp, Homo sapiens
atcattgtggaggcatctgattcagggcacagccctgacatcggactatgcaaattgattgggacaccattgttatcgtaagagagaggaatttttccattcacgaagcctcaagtgtactgttcttctataggctgaggcatagggagctgccaaggtggaagtcaaaaccttgaggggcaggcctgagagcccagttgatcccagggcttgtatctatgtgaatgaagccgccccacccctggcacccagttgggattttctccagcagcagctgcaaaggctggaagccccttggagaagcagcagagaaataaatgagaaggggatttgatccagggctggggagtggcggcggatggcggatgtggttcaaaatgacaaggggtggtgggggaagaggtcccagttgaactgaaaatgaaagcaagacaggaacgcactgtcacattgagaggatagcattttagctggagaatgtacaggagaaggtgtagacatagttttgtctgtgtcagacaccttgatagcaaacactataggtagaggcttctggaggcaggattgctcttagtctaaggtcttatggtaacatttgcaggggatacgggttagcattacaaaatggggatgcttcaggaagggcgtgggcgagtgcttcttgctattacttcttgtaaccaaagctagtctaggcttttgggtatgttcaacactgcatggcctttggagcacttttatgggaagaggtaagaaaatgttcctgtgggcacatttagcacacagactaaatgtgagcttcaaggaagggagggtgggtgggatagacagagagagagaggttgtttaggaggaagtttgacaaggggaaagctattaccagcacaaatggagttttgcttgagtcatcgacttcttctcaggtttaattcaagtgcgcaaccaatactgtttactttttcttttttttcttttttttttttgagatggagtctcgctctgtcacccagactggagtatagtggcgcgatctcggctcactgcaacctccgcctcctgggttcaggcaattccgtctcagcctcccaagtagctgggactacaggcgcgtgccaccatgc

SEQ ID NO: 138691 - DNA, 1571 bp, Homo sapiens
ggtcatatttaaattttttaaagtgctgactttgaaaatccttaaatattcaaggaaaagtttgaacggagtggaaattctaaaatgtttgcttacttttatggtggtactttgattttctgaatgtgaaggatgccaaaaggccttaaatgataatacttaacaagtattgttttctcccaactttatacatattcatactactgtgctcagtcctgagggaggggaacaaaaaatatatttaacatggtcatttgttgtcttagagtgtctgtttcttactgaaagaagcagttatttcatgaaagtcttgacgcacatatgcactaagctgagataaaaataaatataaactaatgaaatctaatagtaaaaggacaactaaactaactgaacacatactttttctcccctctagtgccccaaaatgcgccgtcatgcttttgaactcaagatgttagataaatatagccattatctggctgctgaaactgagcaggaaatggaggaatggttgataactttgaaaaagattattcagatcaacaccgacagtttagttcaagaaaaaaaggagacggtagaaacagcacaaggtcagaattttaaagtgatttattattgaagtaaagcccttgtctttaatccgtggaaatgtcctctgtgcagggtgagtagagaactcttaatcttaaaagttgacctgcttcttcattaataagtgactgtggaggttgatagactttttttaaacagttgatgctgcatgggctctgacatatgaaatataaccagactaaaacagatagaaaattcatggcaggttttcaaaagtccattaaagttttccctatgctttcataatagaaattctttgcaataaatcttgtaggagaggatgggtgggagagatagttaggatactcctcttaggttattagtaatggtctgtatggtttagaacatctgcttttaatgaatttgcagatgatgaaactagcagccaaggaaaagccgagaacatcatggcaagtttggaaaggagcatgcatccggaactgatgaaggtacatctttcatatggcaacttgccttcaactgagataatgcaggattagctattaaagttttaatgctggattccatttggcaatgtcatttccacgttaaaaaccacagcaaattggtgaaacaggtagagattgtaaaagaaaagttgcactcctgaagactaacttgtaagtaccaactgacagtttggaaaaatcttatttttttccagacaccaagaaatacttccaggcttttgtgacttcattaattttatctgctagttcttatttaatttaattactgtatatcattcataaaatattcttcttccaaaaggataatgatgcagctcatgcacatgatatttaatctatgaccaacatatgttaatctcacatgaaaatcatattctctatatgtaaatatatgtgtatatgaatgatttaatctgataaagattttggtgaacatgcatcatttttgttatttactctgctgtttgaagtttgaaatgaacc

SEQ ID NO: 138692 - DNA, 1089 bp, Homo sapiens
ttacaggcgcccaccaccacgcccagctaatctttgtatttttagtagagacagggtttcaccttgttggccaggctggtcttgaactcctggcctcgagtgatccacccacttcggcctcccaaagtgctgggattaccagcatgaaccactgtgcctggccttatcttataaaatgattttatagattttagttgcattccctctcaatctttgtcatcctggattgtgcagctccattaggtatttcccaaagtgatggaatcagaattacatataatattctatagctaacataatggctatgaaaactatggtgatttctcttttgtttatttctcctttgcatccagagtctcttgcattcctgttttgtactgactacaggatgaatggtatatttttgaagctgtgacagattgatagtttcacataaactatacatttaaatagtatttaacactgttttgaaggaaatgaagtaacatacttattttttaaaattttagtatggaagagaaactgaacaactaaacaaactcagtagaggagatggaagacagaatctcttttcttttgattcagaagttcaggtattaatgatacatttctttaatagtcctagaattattgcttattcagataaacaacatctttgaaatgttgaaatcactgtttttcttgcaccagtggggaatatagattgttttatatttgtcttgtttgctttgaacaggtaacttaacaaataactcttcactcaaggggactgtcacatatgcagataatttggggctgaattatatatatatatatatatatatatatatatatatatatatatatatatatatatttctcagtttcttgtattcttttcacttccttttgctcctcaaaatagataaattaaagcaccgttaaagatggttacagtgttcttttagcccatgaaatacaattgtgatctagtggcagaaaatatctccagtataaagaacatatgagtcatatgagacatttatttttcacatttgatgtaggcctgtagaactaggataattgtcatgtctggcttaatcacacttt

SEQ ID NO: 138693 - DNA, 1045 bp, Homo sapiens
gccataatataattttagctaagtgttgaactcagaaaggaattgtaatcacagaaactggaggaatacaaaacttattttgcacttgtgcccctccccgccatgcccccactaaagtctcagttttaaaatgtaactgttttcattcccaggttgagcccttttttatcaatcttgccttatttgatgtaaagaacaattgtaagatttcagcagactttcatgtagacctgaatcccccatctgtccgtgaaatgctgtggggctcttcaacccaactggccagtgacggtagcccaaagggctcttcacccgaatcttacattcatggaattgccgaatctcagttacgctacatacaacaggtaacgaatgacctttagtcttagcagcgtattcagaataagaaacagaaatattcttgtattatttcatggtttcaggccaatgttttcatggcattctctctcttgtaaggtctgtcgatagagatttttctggttactgaagtttgagggcaaaaatggaaaccaatgaacatgctagtaacatgttatcaaaggaacatttttaatgggaccatgatgtgagacacaagggaattattttgtgagatagaaagctgaaccaggccaggcgtggtggctcacgcctgtaatcccagcactatgggaggctgaggcgggcagatcacttgaggtcaagagttcgagaccagcctggccaacatggtgaaaccccatctctactaaaggtaccaaaaaaattagccaggcgtggtgatgtgcgcctgtaatcctagctactcgggacactgaggcaggagaatcgcttgaacccaggaggtggaggttgcagtgagccgagatcacgctacactgcactccagcctgggcaacagagcaagactccgtctcacaaagaaagctgatacagacacccataaacacacctgcacccacactcatacatatacttctaagcaaggcaataagtgcttgaaagttttggtttttaagaaaaattgaccctaaattaactctcc

SEQ ID NO: 138694 - DNA, 1180 bp, Homo sapiens
ggccatagaccttgtcctaaacggccagacctccagcccacgtgggatttctgggttctctctggccaccttttgcattctggggacagggagaggaccagaagctgttgggacaaaaggtaaaacaaccccaaagagtgtcccccatcattggaatccctggtcagttagaaaatggacatctctgtgcctcagcatccttatctgcaagtggaggtggtgacagtacctgtctccaagggctgtggggaggcacaaataaggtgcgtggttctaagaaaacactcagcactgtgatgggcacactgggttagcgcagtgcagcgtagcagccaggagtagtagcactgacagtgatctcaaacaagtgaaaacagcaagcttttatcaattatcaactatcttaaaattatagtcctcattgctggcatcagtaggaaatgcttagagtactgggaatgggaaacaataggtgctcagtaaatgttagctatagcaataatcagtattactgttctcaaactcctgggctcaagcaatcctcccgcctcagcctcccaaagtgctgggattacaggcacgagccaccacacccagcagtattactgttctaatcaggcctcatcatatgagatgttgggtgtatgggactcagggctgagagagaatatagcatgggctgtgtaatctggaagcctgaactgcaatcttcttcacccacttactcactgcacaaacctttctgagcctccacttcttaatctatagaatatgtatatagtagtgcctacatttcagggtttttatgaagactgaatgagataaagcatgaaaaccatctagcatggttatgtggcagttagcgtaacactgcactcaaggtgcactgctcagcataccttctgcagggacagcccgggcagtctgccaacccgttcagcctcacagctcaaacagcatgttcccggcagtacccgaagccaggttctgtgaccttgggatgctttggtgggccacctgggtaatagcaaggtacctgatgtgcattacttcatttaatccatacaagaaatgtatgaaatcactactatcctgctatttcacagatgagaaacctgagacttagagagaatgtgacttgcttaaacccataaatgttggagccagaacccaagaaatt

SEQ ID NO: 138695 - DNA, 1035 bp, Homo sapiens
tttccttcttagtggaaataaatattagttaaatattaattgctcttgagttacatgcagctgcatttaaaaatgtatatctagttccactcgagaaatgtactcacttcgcatacacaaccaaaccaaagaggcaaagcagcaacggtgacacctgcgctatggagactaacagatgtgaggttggtgacaaaatataaaatccattttgaaaggaacgttggaagctttgaaaactctatgaaaggaaattctatctatttctagggtcctggacatgatcctttgttgaatatgaacattgtttactaaaaatcgttaaccataaacaaccatatgcacaagattacataagaaagtctaacggaagtacttttttcccagggaattttctcagtgacgaatccacatcctgaaatttttctagttgccagaattgaaaaggtactacagggaaacattacacactgtgcagaaccctatatcaaaaattctgatccagtaaaggtaatttataaaggttgttgatcaacatttcaccttaacgtagaatttgccttttactgatattttaaatgccattgctttgagcatgctatatattctgaaaacattgtatactgtgtatgtttgctaaaacttgaacatggcatattttcctattgtcattgatgttctgttaatgtgataatctgatttctgcttgattatcaaaataagagccaaaagcttttaggcaacatctgctaattgacaccatatccttgacaatagccgttcttttccttacagccctacatgaagtgctagaatgaatctcagagctgggagattaaagatgatccagtcctatagttcccaaatgtcagttcatacccagatttactcctgtctgtgatgaaacgagaaaagaaagacagacagtgaacatttcatgaagctaaatgtatttaattcaaagggctgccctttattctgagatctttgcccttcctactttttaaaggttatgcgtatcttcctttcatgaaatgt

SEQ ID NO: 138696 - DNA, 1018 bp, Homo sapiens
ctcagtcttgtctttttgggttcttaaagttgtcatgtgatttttttggtcaattactaagaattatgttttttaaatcgctctttgagaatgcaattcatgtatattttttatacatgcaggaatgtgttaatgattattaaactgaatgatctttgcctgtttttttccctgctatagattgtattacttcttcatatgtgcccttgaagccttttgaaaagaattgccaaaatattactgtggaggttgaagagtttgttccagaaatgacaaaatattgttatccatttactatttacaaaaaccatctgtatgtatatcccctgcaattaaaatacgatagccagaaaacatttgccaaggtaaccatgtaaactatacatttttggagtataaaatgttatttataatctgctaattgtgtgactcattttgactgattaatcattttaggcaaggaacattgcagtctgtgtggaattccgggattcagatgaaagtgacgctagtgccctaaaggtttgtttatgatattgataggcatatgtttttagtagagatggagattttggtactcagtagtcttatgctctaggtttaatttgtatcaacatcaaaaagaaaatgttctaaagtgacaaatgtaatactttcttttctactcttacatattaactataaggcttagtttaaatattaatgcagtaggagcatatatagctttaaaaatgccaggttttggcttttgctcctttttgattttgcaattgcttcaatgcccaattgcaaggtcgttttcttatgacctgatagtttataatggtaccatcaagggactataaactcctttctccttgaaacctgaacaggctttgagctgacagaagcacagcatgactgctttgatctgagatacgacttctactccgtgactggccaaatggtgcctccagtcttggattgtggtctatgaaaagcagaatctcagtcttatctgatacagcaatccttaaat

SEQ ID NO: 138697 - DNA, 2019 bp, Homo sapiens
gtggcctaccccatgtgcttgtgtacatggcagatttacctggttttgctgctttgtatagtggtcaagagctgctgagcctgggcattagaataccggataaataggtctgcaagatacaggaggagggagaggtagagagcttgcatttgaggataatgaatcaaatttcatatggctgtttccatctgtgttccaggatctgcatgtgcacaaattcttccatcattgccagctgattcagtcaggctcgaaagaagttccaggggagctcattaaatatttaaaggtaaatgaacagcagctttctgcaaaacgtttgtttttcatgtctttctgttgccacattttggtgtgaaaaaaaaaagcaaacagacagtttaaaatatttttggctgtatttcctcaagagaatactttctatgatgtatttttccatcatgtggctgtttagaagcagacagcagagtggcaacattaggaagaaaatgtaatagccacaatgcagcatcatatttttgaaactctcatgaaaatgtttatttcaggtccataaattgatttttcaggggctttctcttcctgctgactgcccaataaaggtggaggatgctgtgggggaaagggccaggaggaatggaatcactttgacttggaatgaaatgtgaaattgttcttgtgtccatgggtgatagactaacaaaggggctagctaatgaaagacacatattttatgcatgttggcatattgtatcttaccacatgtatagaggacctaacacttggttttttccctgtgtgctaggactacagtgcatatcataatttgcctgacagtggctctcttcttttaattgttcctttagtaagatagctatagcaagtctgaggaaatattattttaaatgaaacatctttaggatttacctttggacatatgctattacttaatgatatactcaggaaacaaaaatgttcatttctttcagagaggtagtatgagatgagatcaaatatatgggttctggaatcataaactgagcttgtatcccacatgtcacttactagctctgtaactgaccatgaccaagttacttctctgagcctttgtttcttcatctgtcatgtgaggataacaatagtgcccatcttgtagggtggttgtgagacttaaatgagatgatggagctgggcatggtgcttcacgcctataatcccagcactttgggaggccgaggcaggagattgcttgagctcaggagttcaagaccggcctgaccatcatggcgaaaccccgtctctactaagaatacaaaaatcagccagacgtggtggcatacgcctgtaatcccagctactcaggaggctgaggcaggagaatcgcttgaacctgggaggcggaggttgcagtgagctgagattgtgccagcctgggtgacagcgagattctggtttgttttctttttttttaaaaaaaaaaaaaaagaaaaaagaaaaagattagggcatctgccggatagtaatcgttcatgccacacttatttctttagtgcttcctatgggccaggcatcattctaagcattggaaatttaagtggagaaaacaaataatatccctattgtcaaagagcttacttgttgagacagacaataaacacataagttaataaatatatacgtcatctcatatggtaataactgttataaagaaaaccagcacaatgaaggggagcagggatttacaaggggtccctgttttaaagtggccagagaaaatctctctagtaaaggcacatttgagcagagacctaaaggaaatgagagtgccagccatgtggatttctcggggagagctgggaacagcaagtacaaaggccccgaggagcttggcttggtgtgtttggggaacagcaagaatcccagtgtggctgggacacagagtgataggacattaccttggggaggttgctgggagcttgtcgagtaaggcttcataagccatggcgaggagtttgaatt

SEQ ID NO: 138698 - DNA, 1030 bp, Homo sapiens
agcctcccaagtagctgggattacaggcatgcaccaatatgcctggctaatttttgtatttttagtagagacagggtttcaccatgttggccaggctggtctcgaactcctgagttcaagtaatccgcctacctcagcctcccaaagtgctgggattacaggtgtgagctgccgcgcccggcctactttcttattttattcatttattcagtaagtcaccaaatatttattgaccatgtagtatgggccagacattgttctggatgctatgaatcaaatggggaacagtttagacagcataccttttctagttgtggtagagagattataagtgagtgccatgaagaaaagagcaggttaatgagatccaacatgaccaggagtgtattctacatagagttgtcagggaaggcctattgggggaaatagcatttcaagctgaaaggatgagaggaagacaaccttagggggtaaagtcgtgtaaaaggataacagaatatcacagtaggtgtaaacaccttacatcagcatgtttgaaggacagaaaaataaaagaccgtgtagctatagtacagtgtgcattgtgaggggaggatggcaagtgacaggtttggcgggacaggccgggtatgtcgtaggcatggaagcttatgatagctctttgttcgtggtagtttgttttgttttgttttgttttttaacaacagaaagatggcaatgtctaatttgcatttcagaaagaacactctggctgtcatgttgagaataaattacagaggactgctactggtagcagggaatgcccatctctcttttctacctggcactattctatttatcatttaccctttctcatctctgaggccttaccagacattccctacccacttgcacactcagttgcttctttgtgcattttgtatattccatgatcatgctatttactgttgatattgcaattatttagttccatgtgtttatcccctgtacactgtgaactacttgatggtagaaaccatggcctttattt

SEQ ID NO: 138699 - DNA, 1088 bp, Homo sapiens
actatgctagctataccgaggtcgactaccaatttaaaacacaagttaaaaacgtaaactgagtattattctaagtgaactaactcaggaatggaaaccaaatattgtatgttcttgcttataagtgggagctaagctatgaggatttaaaggcataagaatgatataatggactttggggactgggggtgggggccagggaggaattaaagactacacattgggtactgctcgggtgacaggtacaccaaaatctcagaaattactgctaaaggacttatccatgtaacaaaaaatcacctcttcctccaaaactattttttttaaaaaacctgtaatctgttaacctcccatccattctgagaaagcattagtgagctttttgaagtctagataagacccggcagttgacagagtaaatgaaaatacatttgagtgcagaactgaaaaaaaatcattgaatttacacttaagaccaacgtatttgacaaagataattgggcacctttagaactctttgttttctatcattaagtgccctttgataatgaagccaagagggaaggagcattagagtatattttaaatccctgatacatatccattgccaaaaatgttttgttttctctaattcctaaccagtttctcttgaagtacattataaaacatttttaaatcaagatggaataaaatactactcatcagttgacacattggaagcagatgttctactgtgtagcgtttttaaggaaaaaaaatactttgccctattggatcattgcctaagcagggaagggcttaggggcccttgcccctcaaaggtgactgcacagcacccacaagggaccatttccagatccttttcttcactgtgtcaggcactgaattgacaggaaaagggaaaggaggtatgcagtactccctgcccccaccctcaccctaccctcaaacttctttcaggcagcctgagctcttgcttgttctaccaaagagacttaaggatcactattctcttccctttattgaaggcacctcaaagtgataatactgagtgtcagctattctccttcctcccaaaaaatataaaa

SEQ ID NO: 138700 - DNA, 1048 bp, Homo sapiens
cataatatcagcagatttgtttttgaggccccttacactttatcaggcaaaaaacagggctgtatagaagaacagtgcaaacgccgtacaatcttgacaagtaagtacaattttacatattaacttcttatttgtcttggtctttttcagcatacacgagtagcagctggccagctggaacatacaactgaaattttaattattatttgttctgctgttcagttacaagtttgcacaagcacgtccatgtgataaaccatcattttcccatatgtcatccatgattgcccagaggtgtctcataaagagaatttctctctgaatcctgaagtactatatgggaccctaagtcatcttctagataaaggatggggagagttaagcacaatagagttttttctttaatttggctgtttgaacaaatgattttctaaagtcagtaaatcaatcttaacattttaatagcttcaaactcgtttccttacgtgaagaagaggattcctattaactgtgaacagcagattaatttaaaaccaattgatgttgccactgatgaaataaaagataaaactgcagagctgcaaaagctttgctcctctactgacgtggacatgattcagctccaacttaaattgcagggctgtgtttctgtgcaggtacgttggtcatccaacatgtattgaatgtttcttgatgtttcttttggttttataagggcacagagcaagcattaattgtaattatgtgttgggcacttactgagtgcaaaaacctgtgcattattttttgttcatttaatgaagatattacattgaattttttaaagttttgtgttatgtcagaggactttaacataagtccgatgactgtagcgaagccctgtatgtacatatcagaaatcactaacttactagaatatcatctttgtagattattttctttagttaatggttttttgaaataaacttgaaataagcatatatttctcagatatggatttcttgtatattttgggatttttaataaaaaagagaaatgccaaaacttc

SEQ ID NO: 138701 - DNA, 1075 bp, Homo sapiens
gtaaagagagtggatataatgtatatagcgttttttacctcaatctactttaagcacaagatttctgttgctttttctttagattacacaaaatggatcatttaaaaaatatttaaactaatacgaatatctatgtttatatacttactggaatacaatctttaaattttatatttatgaagttcttcctttccaagaaaaatcttctgtatcaattagcttatacaattataatgtgtctttagaaatatgcacttaagacttttatcttcatttactattattttcaagtctccagggaaggaacataggtatctgcatgtttcaaaagtcccatagatgattctgagaaccactgtgttagatcattcataaactcatgtcagagtctaccatttagagctcttgttatgaccatctgttaaaaaatattttaaagattgtgttacctctcgctttttattgaattttgcattttacagtctttgtttttcttaatgagtaactagatcttttctgcttttttgatatgctgcctttgtaatacagctttgaagacttaagtcggtaatgttattctttgctctctctgctttctgtctttttaaataactgtcagtgataaattgaaatatgcctgcaatttcatatacacattctttttttggcagtggctattttgcttcatgataatcatgctgatttcttctgttttagatattacaagaagacacaatgcattctccctggatgagcaacacattacatgtattttgtgcaattagtggtacatcaagtgaccgaggttatggttccccaagatacgctgaagtgtgaggaaatgcagatgtacgtgacaatgagactgacctttctcaggaatatttggagctgtgcaaatgttaaaatttaaagatttgatatacatggagtgtttcttctcgacaccaaaattttcatgtgttccaacagggtgcttacatatttgtaaataagcaacttgaaagtgcctggaaaattgcaccactgtgcttggtttgtacttttttaggtaaatctatatgctgaaaagtag

SEQ ID NO: 138702 - DNA, 1026 bp, Homo sapiens
cagaatacaaatccctgatatttggaggacagagtacttctgcccacatagcccacaagctgtgggcagagggctccaggaacatgtgcacagccgcctgccatggggttggggatgaaggatgggcagctactactatgtaaaagctgacattgattgaaatttatggcaatttgttgttcaagcctttcctgggaaattgcaagccttcaatgtaagtgtttcctgatataactctgcagtcttccaaaattgttacatcaaacagactctgccactaccattgttatctaggtgaggagatagatgtctggtgcttcctactcttgccttattcccagaatccatgtgtgtgtgtttttaaagtgtaggaagtagaaaaatcaaaagatatggaggaaaccagaagagaaaaagaaaaggatagcagatagccccaggaagcccaaaatgcaaaccagttagaagatctgaccaaaggacacttcaaaacagatgggagaatattaatcccatttgaaaggttgaatatagggcaggccattgttttatttcaaaactgaggttaaagtaggttttaaattaccttgaaaataaattggagtacaattgaaatgaaccacaaataggtatatttttattatcagggctttaatatttgtgtgggagtgggaggtaggtgggtagggagagtactggaagtgctaaactaggtttcttggatgtgtttctgggaactgcagaataaggcagataatcctacagtaaattgtagtctccagtaggaacaatgtttttattggaggctctctacctgacaaatgatttgtcttcaaaaatatcattgatatggtgttagaaaggccaaaatggaatagccatacatgcttttaatcacttaaaatcctaactttagcactgttgcctgagccattggtgctccctggtactagctcagttttaatgcagtgcaataggaattctttgtttccacaaggccttgtcctgctgtgggctgctccttcc

SEQ ID NO: 138703 - DNA, 1027 bp, Homo sapiens
taatcccagaactttgggaggccaaggtgggcggatcacttgagctcaggagttcgagaccagcctggccagtgtggcaaaaacccatctctactaaaattacaaaaattagccaggcgtggtggcatgtgcctgtagtcccagtaacaggctaggtgaatcacttcaccccaggaggcagaggctgcagtgagctgagatcgtgccactgcactccagcctgggttacaaagtgagattctatctcaaaaaacaacaacaacaaaaacatgaggctaatactagtccctatctccaagattgttgtgaggattaaatggattaatatgtgtggaatatttagaatagtccctggcccagtaaatgttagatgttgttaactcagttattactgtcttgtcctctaggacttgggagaattaagcaaaccattaaaaatactgttgataaattcatttttttttgtccttgatttgaacagaaactcagccacctgtgacaaatttgagtgtctctgttgaaaacctctgcacagtaatatggacatggaatccacccgagggagccagctcaaattgtagtctatggtattttagtcattttggcgacaaacaagataaggtaagttttctgcaacatgttacattgatgaggtaaagtgaacactatgaattggagccaagaataagccaaattctagtcttacgtcaaagtggaaattgtattttagggtgtgtttaaatttcagttggggaaattatagaagcaactattgacacaagtgaacacttaaaaatatttgctaattatttgacaattaaatgcaattgagattgctctgacaggaaatactagatatctttttctctaaggtactcaataaataattatgttattgttaaaatttgttcctatgttcctgcctgtagctgtattgccttgtatctatataacacttaattttggggaatttttacatttaccatcttgctaatcacatggacaaatagatgtacaggcactatgt

SEQ ID NO: 138704 - DNA, 1028 bp, Homo sapiens
cagtgaacatgacacctgacaagtttttttcttcatgaaacctacataatagaaaacgtaagtaaataagcaagctaatttcagaggatgagtgctgtgaagaaaataaaatgggctgatgtagtagagtgactgggagaacgagagggaatattaggtagggaaatcatctgaggtaataacatttgagatgagaccagaatgatgagcagacgctagccatgtgaagatctgggtgtagggggtcagcagatacagactctgaggcaaaaatgagcttagcatgtgtgagagaacagaaaggagggtggtgtgaacaaaatgtagcaggaaaagatgtctaagcagtaggcagacatcagatcttgcggacactttggaggctctgataataccattctgttttcttggagtttgtggcaactaaagtaatcagatttgagtagtcaatatttgttggattatgtgcctgtatgctattcagaatcaaatgcagaacatgctaattagaggccctgtaggacactgaccagagtgtactataatctcaggacatcagtccagttgttctgctttagggtaaaggtcacaaactagggcctcacacttttttgtgtggaacacaaagtcgtgttttgtttgtttgtttgtttactagatttgaattttttgcccagattttaaatcatagtactttaagagtgtgtgtccataagatggcgccttaagaccatgaagactgcaccactcacttgtctgctacctgcctggaccctttgtgtgtttgagttttagagattagaagtgaagtgttttatattggcttttaaaggagcctagcatctcgcacgtgggtaaattccttggtccagttgttttagctcatcatggaacttccaaaatgcttgctaaaataagccagtgttgacaggctataattccaactccagagggagtgaccaagtccacagcagaacagaacagcaaatgctcttctgggcatttgcattatgaatccttctgctgaa

SEQ ID NO: 138705 - DNA, 1316 bp, Homo sapiens
cattgcctgtttatttccctataaggtgtcatttgatcaacaaatgtttttaattttaatatggatgactttattaaaaaattctctttatggttaatatgggaggtttttttggtcttgtttaagaaatatttcccttcttcaaggtcattaagatattctctgtttttatctaaaagcttgctatagttatgtatttattaattcattttatcttacacatttaaatctgcaatatatcaggaactgattttgtgaatagtatgaggtagggcgtcaagaatctttttttttttcatatgcatatgtaattgacccagcaccatttattaaaaaaggccaaccttttttcactgtacctgatcatcttttaatgggataaaaggaaagcttgttagaaatgactaggtgatagaaaatgggtttttaaacatttaggactcattagtttatttatttatttttattttcaaggtccaagaggctaaatgtgagaatccagaatttgagagaaatgtggaggtcagtaaattcaacattagctatttgggtttagacttagagcagttgggggtggagcatagcctaaatatgagctgctttgagaaaaacaaattacgttgttccgtgagttattgacaattttttcgaaaagtcaaagataatttgaattgcaatccaagtcttaatcatagacagaatttggcagataattgtattatgattcaataacagtgaaaaagaataaactggtaatattccttgtgtatttttattttatgcctaagaatacatcttgtttcatggtccctggtgttcttcctgatactttgaacacagtcagaataagagtcaaaacaaataagttatgctatgaggatgacaaactctggagtaattggagccaagaaatgagtataggtaagagaacagaatttttattaaaatttaaaacactgatgtataaaaactaagctgaagcagaaaatagactggggaaagggactgtcatgctctcttgatgtcaggaaaagagtacttacaattgaaatttattttcttcttaatcactttcaaaccacccagggttaattgacagtatacagttatttagaaaaccataatccaaatggttttatgttcttttctatctcatttccatttttattaacaaactgaacaaaaatatagaaagcaggcataggctgcacacagtgactcacgcctgtgatcccagcactttgagaggctgaggcaggaggatcgcttgagcccaggagttggagaccagcctgagcaacatggtgaaaccccat

SEQ ID NO: 138706 - DNA, 2464 bp, Homo sapiens
ttaatatagggtctttcggcaatttcgattgcagtaagactttaggaacatcttatgttttaccattcatctcaatgctacttgactttttgaacctattatgtctctggagcaatgagcattaagaaaataaaggtaataaaggtctcagcaaaacagttggagtaagaacggcatgacatccttttattcttcttaatagattttatttccagtggtggaaatgtccaaatttgtttatttctggagatagtcattgtacatcatgtaactatctcatgattcccacctccatttaatattaattcctgattgttctgtttcattaatcattcagatagataaagattcttaggtcaaaaaaaaaaaaaaaacaggaaatcatacccctacggttccatccacacaaacctaaaaataagcattggcactaagtactcagggaaagaacactgtttagatatgtcattgtgtatgtgtttttttcctcccttctagcactggaagaagtacgacatctatgagaagcaaaccaaggaggaaaccgactctgtagtgctgatagaaaacctgaagaaagcctctcagtgatggagataatttatttttaccttcactgtgaccttgagaagattcttcccattctccatttgttatctgggaacttattaaatggaaactgaaactactgcaccatttaaaaacaggcagctcataagagccacaggtctttatgttgagtcgcgcaccgaaaaactaaaaataatgggcgctttggagaagagtgtggagtcattctcattgaattataaaagccagcaggcttcaaactaggggacaaagcaaaaagtgatgatagtggtggagttaatcttatcaagagttgtgacaacttcctgagggatctatacttgctttgtgttctttgtgtcaacatgaacaaattttatttgtaggggaactcatttggggtgcaaatgctaatgtcaaacttgagtcacaaagaacatgtagaaaacaaaatggataaaatctgatatgtattgtttgggatcctattgaaccatgtttgtggctattaaaactcttttaacagtctgggctgggtccggtggctcacgcctgtaatcccagcaatttgggagtccgaggcgggcggatcactcgaggtcaggagttccagaccagcctgaccaaaatggtgaaacctcctctctactaaaactacaaaaattaactgggtgtggtggcgcgtgcctgtaatcccagctactcgggaagctgaggcaggtgaattgtttgaacctgggaggtggaggttgcagtgagcagagatcacaccactgcactctagcctgggtgacagagcaagactctgtctaaaaaacaaaacaaaacaaaacaaaacaaaaaaacctcttaatattctggagtcatcattcccttcgacagcattttcctctgctttgaaagccccagaaatcagtgttggccatgatgacaactacagaaaaaccagaggcagcttctttgccaagacctttcaaagccattttaggctgttaggggcagtggaggtagaatgactccttgggtattagagtttcaaccatgaagtctctaacaatgtattttcttcacctctgctactcaagtagcatttactgtgtctttggtttgtgctaggcccccgggtgtgaagcacagaccccttccaggggtttacagtctatttgagactcctcagttcttgccacttttttttttaatctccaccagtcatttttcagaccttttaactcctcaattccaacactgatttccccttttgcattctccctccttcccttccttgtagccttttgactttcattggaaattaggatgtaaatctgctcaggagacctggaggagcagaggataattagcatctcaggttaagtgtgagtaatctgagaaacaatgactaattcttgcatattttgtaacttccatgtgagggttttcagcattgatatttgtgcattttctaaacagagatgaggtggtatcttcacgtagaacattggtattcgcttgagaaaaaaagaatagttgaacctatttctctttctttacaagatgggtccaggattcctcttttctctgccataaatgattaattaaatagcttttgtgtcttacattggtagccagccagccaaggctctgtttatgcttttggggggcatatattgggttccattctcacctatccacacaacatatccgtatatatcccctctactcttacttcccccaaatttaaagaagtatgggaaatgagaggcatttcccccaccccatttctctcctcacacacagactcatattactggtaggaacttgagaactttatttccaagttgttcaaacatttaccaatcatattaatacaatgatgctatttgcaattcctgctcct

SEQ ID NO: 138707 - DNA, 1168 bp, Homo sapiens
gcgctgtgcggggtcaagctctccgccttgatggtggccactgggcgggcgcgtggagcccggcgggctgggcagcagccgccgccgccgctgcgagtcaacgtggtgctcagcggcctcctcggcaagttgtttccaggcccagcgcgagcgtcgcaactccggcacgagggcaaccgactgtaccgcgagcgccaggtggaggcggcactgctcaagtacaacgaggcagttaagttgggtgagtccaacgcgctgccgggccggggctggggctcggtggctacatgagggagcgggagaacaaaccccgcagcgagaagggatttggaccagggcagaagagggggcgggggacccatggactgtggcggggtgggggaggggtgattctggggctgggtctctgagtttgttctgttttcactgcttatctgtgtttcactgtgtttgtgttgatctcggttgctttttgtcttttcctgctacttctgttagcttttgtgttcctgtctctcagtccccgttcctgtctgtgtctccttgcttctggttctttttctccgtctcttcgtatctttgtcactgtttctttctttttcggtgtcactgtctctgttcctctgactctccttctcccgctgcactcctggtctcctcttacacctgctcgcaccttcccagcgaggagaggaacttcgcgcgctcctcgcacttgcgcccggtcctctgggctgtagccagcaggagatgtccggtcggcgcctgcgtccgccgctcgcgccgccgggtgttgccccttccggggccgcggctccctgtggggtgggtccggcatggaattaggtcaggagagcactggttgcataagggccgcgagcggcccgggtcgggcgcccctcccccgcgcgagcgggcgggattgtgtaaccgctgaggtaactgaagtgggccaccacgctcgcttcggaaaccatcccacgagcatgtgcggggggagggggagcgcttgcgccccgctgccctgtgactcattgtcaccgcttcctatcacacgatcctcggctgaaatagatgcccccccttgcccgccccgccaacccgtagcctgtgccctcgcctccaacccctttaacctggccagcccggcgggaggccggcgcggcaa

SEQ ID NO: 138708 - DNA, 1100 bp, Homo sapiens
gagttgaaatgacatcaggtccagctgcctactggaccctcccctctctgtcttatctaggaaggggagtgagggtgctgtcctccttggcatttggggtcctgagtgggtggttccctgggttaaggggacaaaagggagatgggagtgttaattgattgcccagaaacaccgtccttctggtgtgtacgatcagtttgggcagtttctacatttttgtaggagcctgtgaggaatgttcttgcttctttgactcagggtctggattgtcagtgggagaaaaaccaaaatcaagtacattaatatggggattgaggctcactgaggacattctggctgttgatgagagatccagggcatggggctacctgctgttacataacttttctttggctgaatcacagttttcaccagccacacatgacagccagcccctgggaagggacgttggtggtccccacctcccctatcaccatacacagaactccaaccttcagctcctttgctagaaataaaacacactgcctcacaaatgctagtcagagaccattacaatataatgcaagcagtcgttccaactcttgggtcccagcagaatgtggtagttataaaagaaaaatggtgtgaaatactgagagcattagtgaaggctcagccatcttcaattcatggactttgttgcttattgttctacagtttactctgctggtgtctgggtaatcggcctgtaagttggattctgacagttggcggttgtctctgctctccttgtgccccacccactattcaccgcggagccttacggtttctgtcccagtgtggtttggcagagcagtggataaagaaagtgagcaagagacagaactggtttctgaaggctctagaaaggaatagttagcaaaatcaatgaaataagggaactggccctggattttctgtctcacaaaagatctcctttctgggaagttgctttgaattggtttgagtatgtgaaaaaggtgtgcttgagaggagcacggttcggggagaattgcttcaagctgtggacccttctccaaatcttaagtgtagtccatgatgtaatgataataataatagct

SEQ ID NO: 138709 - DNA, 1048 bp, Homo sapiens
aggcaaattattcacatgctcccccaccccaaaagaaagaggctatgattatggtgtgtgtaaccatacacaattttttaaaattgcttacatgtctttgatttcacagctgtgacttactggcttagaggagaggctccctgctctgtcatttactggctgttgacctggatggagcaagtgacattctctgctactgttttcttgtcagtaaaatagagaacagtgtacctactccatagggttgtcatgattaattgagaaaaatctgtttaacacctggaatagtgcctggcatataatagatactcagtaaatgttaactatttttttttccttgtagaccagaggtccagaaggaaactttgggtctatggacctctgaggatgttctatatatggattctaatagatgtattaatgtctcgaagttgtatgttaaagtatgtgggttttccaggacaaggtccacatcctttagcagattcacaaatgtgtctgttttccaaaagagcattaaaaggaggctgagatatttgcacaaaaattaagacggttggcaggctgctgttcgttgtgctggcgggtcctgcggggagggctgtggagctccagatggactaaagaacaaaccagcaatcccgagagggcccacagtccctctgaaggaagcgggttgcttctgcaggacccaggagacaccccaaatactctgggaggcaaatagcctcggtcgagttctcaagtccctctcactctcctcctggaaacagacttggagctgttggggagggcacggtggaagtgagactggcccttcagtttgcatgggagctgggtgaggcctgtgactgctgtatttccccaacttccctggtaacctgcatgactcagcaaaggcagccataatcctcctaggtacacaactccagtgacctgggaatctcacccccatcccccacagcagctgcagcaagacctgcccaaggagagtctgagctcagacatacctagccctgcccccacccaatggtccttccctaccaac

SEQ ID NO: 138710 - DNA, 1017 bp, Homo sapiens
caaagccaaggtagaagatagagaaatcctgcttccaggcagagcaatgggctcctgcaggtaacaccgttgtggctctaagcccatgatgtgcgctgtggagtagacttgacttagcctgctcagagaccaggtctttgttgtgcgtatccttcttaacactccctccaacatccaggggacaagaaatcaaacatacagactcatcctgtttgtgttttctctgaaaactaagaatcctgaggtgtaagttcttttgttcctctgctttctccctttcatcttgtttgtccttgaactcaacagggggctttggaggaggtctcaaaatttggtccaagaaataaacaccaagaggataagacccccttccagttggctcactcgaaatttaaaagccatcatttcccttatcctgcccctccgttctaagtgagacttcaaaacaaaacaaaacaaaaccctctgtgcctggagtagccattgcatacactgctaagttatagctggcctctcactgcttgatggtgataagaaacctactaaatctagaaagaactttggatcttgaggttctgaaaactgcagccattggtcagaagcatgtagttccctttccaacagggtttgtctataagttagacattggatgttgacagaggctatttcaaacacatgcttcagcttgaattatgatagccttgacaaagcttttgattccacctctccagtgtttttcttctctttcttgttgttaggaatatgattggttctcttattaccctcatgtgtccttgggggagagtgtctgagagtaaagaaagtgtctgaaacaatctgtggaggtcatgaaattagacatttgtactacttgtgcaagattttagtatgaaatccagtttcatggtgctgcattggtagaaaaacaagttagagtatgaatttgtatacacggattctagagagaaaattaggagaagcaggttgtaagttccacagggaaaagggtgaaaagag

SEQ ID NO: 138711 - DNA, 1049 bp, Homo sapiens
ctcctcctttcctctttgctctcatttgatagcaaaagaaaacaatacaaggatgtaactggtgggaaaagatagctatttccagacaagccaaacattttatctgggctgacatcaaactgaaagcatttattattgctattgtttactccatcactgtaacaatgtaaaatgttttttgtgtgaaaatctggccctgctctgatttataaatacctcttggatgtgttttctgaaatcgttacctaaagtggtaaaaaaattctagtcaagttctctctgtctctctctttttcagaaggagggagagaggagagagggagggaggaaaatgtgcatatgagtgtgtgcatctacatgtagatggatgatgtctatttggatgcagaaatacatgcacacatttgttgccgcatcatagagtgaagaagaaagatgggcttgagagtcagatctgacctgacatcccaaagccctgctacttaccagctagctgtgtgatcttaggcaagttattttaacctgtctgggtttaaattttctcaatagtataatgaagctaatcataattaccacctcttaatatacaaagttaagtattgacacaccaagaaatacagccagaaaaatatattccatctgttccagtcactttggctgtgcagagaagcagagtagccctaaatatagaaatgaattgagtattgaaaagtgtaatgtattctaagcatctgaaccctgaactatttcaaaggaataattatgcagcatctgtggccgcatttgtgtttgctaccactcagtcaggggcattttaatcacagcttttgctaagagattgctgtgtccttttgtgtgtgttttattcatctgctcactaaatgtcagtatttattgcaattaattagccagctatatctttgttattttagatagattacattaggttacattcttaaatgaacaataggcccaattgcaaaattctcaggaaaaatggttttgcatattagttgtagatacagattcatcaatcatcttcatcatta

SEQ ID NO: 138712 - DNA, 1047 bp, Homo sapiens
aagccaagcattgggttaggctgggagtgggacagggcaggaaaggttcagtgattgaaaattgctttttagttccctgaaacttttggccactaactttgagcatatcccagatggagacaatttctgtgagcttgtaaatacaatcatcagaaaatggaaagggaagaattccccccaccctactttttggacaagaacatgatcttgatttcagtgtttcagaaaaactgtgagagttttaaaacttcaatgcaggttttacccccttgttaaaaatttttttctaattataaagataatcaattgcatgtgtgtttttttaaatgaaactaacatccagaaaatacatatattatgatggtaacagctgctaatttgtgggtccagattactccaatatgtgggtcatttgacttgttcactgattacatcagaagtgttttgctgattgctacgtattacctaattgcatattgtctaattgcctccccccatgtagtgcttggcatcaagaaaatacagcaaaaatgtaataatggaggagctcatagctaaattccttccagaagaactgaaggaacgaaggaagctttatgaagaggaaatggaagaactttctaagtatgtatatgcatatttctgttttgtttcactcataccagctcaatgagagctgaatgtgcacattacttcccagcttccgacttagtgatgtcatgctagctgcttgaaattggctatggtgagagtatttacaccatggaaattggcaagtgctacaaaccagggtttccgctgcacccagagagccagttgttaaacataccagcataccactgaagaagcataagcgaaaccagtgatgagggtacgccctgcccccagtaacagggtattgttggcaagagtaaattggagtagcataaacaggggaacttaacgaaatgtccaaaagattgttttcagatacataaggagttgctatgaggttaagaactttggtgtcaaccagaaccgggcttaagacccagttctacctcaaag

SEQ ID NO: 138713 - DNA, 1037 bp, Homo sapiens
tacctagggggaaataacaatactagaagtgtgcagtttttgcttttatcttttttttactacaatgacactagttcttagaccatttccgtatctatccaaatggatgcttaaaagaagttcagaatgatgctaagatcatctgtcttcagagtccacttttttttttcagtttgaactaaacaatataaaatacttaagggatttggcctagattatggtatatgccaaggtaaagtaaaataattcattttctgtgtgtaatacagaacaaagctgaaagaattatttttattataggcatttacttcagcaatctaattgtacgtgtatctaatttttccccagtgcagttaggaatcggattttgggcaggatcataattaactcttcagaggaaatggtgttcagtttagcacatcacagtcatgcccaactagcctccataacccacctctccccggggttctgaggatcaagacctggacagaaacacttgataaggactttttattattaaaatgtaaataagacaaatagagtagaaccctataaaaatctttttaaaggaaccagatggccgggcacggtggctcacgcctgtaatcccagcactttgggaggccgaggcaggcggatcacttgaggtcaggagttcgagagcagcctaactaacatgatgaaaccctgtctctactaaaaatggatacaaaattagccaggcttggtggtgtatgcctgtaatcccagctacttgggaggctgaggcaggagaatcacatgaacctgggagatggaggttgcagtgagccgagattgcaccactgcactccagcctgggcaacgagcaaacctgcgtctcaaaaaaaaaaaaaaaaaaaaaaaaagggaaccagataatctattattttacctaagtactgcctttgcttctagttgcatgggtgaaatatttcaatgtatggggagaatatagggtgaggagtaagagtaagccctgatttagcttgcttagtgctagtttgagtccttcagtg

SEQ ID NO: 138714 - DNA, 1106 bp, Homo sapiens
ccaattttctgtagacaacctggagaaaagagtgcctgcccctgacttagcggggcagagaatgacaatttttaaagtttgccttttctgaaggttgcttttagcccagtgctgcctcagcagcaaggggcaagcagagtcattgcgcatgtggcgcttccagctctacctgtggagctggcctgggctcagataatcccctgtgactggccattggagcggcggagctcctgaggctagttcacagcacccagaggtctcttacagtcaacagattgcatactgttgacagactgcaatccgtctgtgttccccacaccaactccatttccaagatgggaattttattcaggaactcatttttgagttcccaacatgttgacttcgcatccatttctgctcaccaaggcagaaccatagcagtggtgtgtgacaaagatgcaaatggagggcagcccaaacaatggaaaagagaagattttcagcccattcttggggctaagtgaggttttgatttatggtagaagacagttctaaaaagcagctggcagcatgggcttcaatttgtggcccttctgagttcaaacagaaggaaggaaaaggagccacataaagtgtacacattcaattcatcttagaatgatagctcccaccttattacactgtacaactatttaataatctgggttacacacatccagaggtgaaataaagaaattttcacttacaaatgtgtatttccaaacatgctaagttaacctccagagagaagtgcctgtaatctctgttcctggtgtcactttaaagcttttgcttcatgactgtagctgttgtttaaaatgtttttgcagcaaacgcgatttaacagaagtttacaaagcaacactgtagctaatgcataattttaaaagttgactaacatttatctattgttaaagcaacactaataatggaataaaaggaaagcaaataggccaatgtggcaccataggcttattttaggtaaattagttccatcatcttatgcagttgtaagtaatgccaggattaaaatatcaagcaagccacgtaaacagtggcaaatgtgtgtgtgttttccatttgtt

SEQ ID NO: 138715 - DNA, 8725 bp, Homo sapiens
cacagagcccggcaatgccgaggccctcccaacgggtcggtctgcgaggagcaaaaaaggggttcagaggagggcagcgcgtgcgtcgcgctcagctataggatggcgcgaggatggcgtgaggctgggctggggcctcccaggtagaactgaggggggcaccgcgcggccgcgggggagcggcgccggactctagaggctttggagggggcctgagggctgcggggcgggaccgagcagggcggggcgcttaggtggcctcgggggaggcggggcttggaggctccgcccctcaggccccgcctcctccccggctagtctttggccgccgccgaaccccgcgcgccactcgctcgctcagagggaggagaaagtggcgagttccggatccctgcctagcgcggcccaacctttactccagagatcatggctgccgaggatgtggtggcgactggcgccgacccaagcgatctggagagcggcgggctgctgcatgagattttcacgtcgccgctcaacctgctgctgcttggcctctgcatcttcctgctctacaagatcgtgcgcggggaccagccggcggccagcggcgacagcgacgacgacgagccgccccctctgccccgcctcaagcggcgcgacttcacccccgccgagctgcggcgcttcgacggcgtccaggacccgcgcatactcatggccatcaacggcaaggtgttcgatgtgaccaaaggccgcaaattctacgggcccggtacgcggccggcgaggggggcttggagacaaaagaagggggccccggcacggggctgggcgggagagaggcgaggcgggagcggggcgcccctgagtggagggaggaatggcggcgagctagggtaggcgggtaggcgggcaggcggagagccgggaggctcccggggcgggcagggaacaagaggcgctctagaggggctgcgggccagtcagggacgcggatccccggcccgcgctgacagcgctgggagggggttagagaaagaaggctgaggcgcttaagccgggggtgggtgggaccacgaagctcgaaggcgttgaggggggacacatcaaagcccaggctgttggggtagttttcgaaggtcctgggcttggggattcctggaaggaggagggggtagtgtcgggttctaggaaggaaatgagggtgttccgagggaggcatgggggagggcgagagtgagaaaaggtccagacctagagaagacgggaaggccaatgacaccgggagtaggtttgaaatatgagggtgtgggagaaaacgccgagacgggattagcagcaggtaaaagctttgtgcccggtggatagtgatgtgtgtgtgcactcgtggtgtgtgcatgcgcggtgtgtgcgtgtttagtgtatgtgatttatcaggggtgtgtgtgtgtggtgtgtgcatgcgcgcttgaaatgggtcatgcgtcaggtatgtgtgtggcatgtgtttggtctgtgtgcgcttgtgctgtgtgtggcagatggggaaaggctggaaggtgaacaaggaggaagggggctgtttgagggaggaataaaggctgaatatggtggacaatggtaacgtggcaagcttttaaggtaatatggtatttagtctatagcaggagagaaaggattagaagccaagaaaaattaaaatggagggagggagaagtgggaggataccaagaaacaaaaggagtagagctaagaagactgctgggtggggggatatcaggaaaagccaaccagagggaaatgaagaatggatgactgctgcactgctgagctgttggagaaggcaggcctgatgggttccttagaggcgaggtttttgcaaacctggttgcgtatcagaatcacctgatgcatctgaggaaaaatacagattcccagtctaaccgccagagctgcaaatgagtctcgggtggtccgggagtctgtattttaatatgcttcccaggcgaatttgaaaagcagccaggcttgcaaagtcctgctttatagaatacttggagatgaggaagaagaggttttggctcctccaatatggactcctctaaacacagggagcttagaggatgtccacatggacggtgctcattccacactggcctgagagagggaagagtacagaaggcagtacacaaactcaggcattcattttagtctcccagtccaactgatcaaaatcagatgtgttaaggttaaggagctcagttttttcttgcagacatttatttattataaaaaataaattttatttattttttagagacagggtctccctcctgtgttgcccaggctggtctcgaactcctgggcgcaagcagtccttccacctccatttcccaaagtgctgggattacaggcatgagccactgcaccgggcctgtggatattttagaatacctgctttctataggcatgtaactgtcaaaatcatttgaaaaccacatacattatttgtcacttagagtagcacacatagttgctttatcaataaacataatcatgtaaatacctgttaatattgagctcaatattaaaggagtgaaaacatgtgcatgaggcatcatcatgactgtagtttgcagagtcattgagaggatgtcagcctgtgcacagagcacaaaactgggagtcaggcaacctgcgttctagtcctgattgggtcatgactagctgtgtgaccttgtgcaaagcattgttctctcagagccttagttttccctctgaaaagtgataaagatggcctattgtgagatctctgtctctatcttgcactgtcattcagtgagcccatgactacgtgacatcttggtagaaagtgatgcttcatgttgtaaaggattcctaaaaattagtcattctagtgcctgttaattctgtgcaaggcactgttgtagatgtgggaatatagcagtgagcaaaacagacacaaatctctgcctatggagcttacgttctagtgaatatatgttgcactgaataatatgtatttttaaaagacttttaatgttcccactagagaacatttaattgtttaaatgtttaaatattctatgaggtttaaatattctatgtttaaatattctatgaggtttgcttggtaaagactcactctaccaagccaatgaccataatttctgaaatggtaaggttcaaaccattgcatttgcctattctcaagcactaggtgctgccatttccactaggggtgtacatttatgaaaaatgtgggcttttttttaccttctttagtgaatgtggcagcatgtaatgatgattaaaaataagcatttttctttggaattttacttgcatttaaaagttgtaaaatttgtaaaaaatttctgagtgtattgaggtttcaggtgaacaggccatattgaaacttgatctattctcatacttggttccctacaaacattttaatgtcagggctgctattcaatctgccttgggggaaacaacacattgtttaaagtacactggattctcttcatttagttgtgcaatatttaaataagtctaaatatccactttgtgtacccacagaatgattctctgctctcttagacaaaagttcagtataatatcacaaataatcacattttatagagttgttttatagagttgttttgcagtattgattcagcctcttttccatgaaaattttagtattttcacagtcttctcaagcccaccaaaaaacagataatgaagactgatctctgtgttatctatttattgacagtgaaggttatgtaatgtggatagatttttaaaccaccgatactgttataaaatggttcttctgcagatgccatgagttaatgtttaattgagccttggaaccaaagatctctataagatacctttgtttcattaaaacatatcagaatatattcataaggaaatgtgttttcatgtacacatcagtgcttattatcttaagaaaccataactctcactggtgtagccccaagtgcctagaactgtcaggctcccagttcaatgttcttgtatgattccctactaccactaccccaagagatcactaaccacgtatgacttttttactagctatttggaaaccacaggagactgacgcaaatgtatagcagtttgatttacttttagttatttaaaagttaaatgacaacaggtctttctgtgtctcctacataatgttcagaatatcagcattactatggtttcctaatggaatttgatattcaaaaatggggctatgttgatgaatagggaagccattttctgtgtataaatcacagagaaattgactgtctaataaagaattgatctttggttttgtttttgaagaggggccgtatggggtctttgctggaagagatgcatccaggggccttgccacattttgcctggataaggaagcactgaaggatgagtacgatgacctttctgacctcactgctgcccagcaggagactctgagtgactgggagtctcagttcacttgtaagcatttttaaaattgtgtctgggtcaaatttctaccagtaatggggattcgtggcaggacaatagttattactaagcagcctgaaacttgggtgcattttgataggctccttaatcttggacgcatcaagttcatggcttgaagtaattgtagcagtgctgagtcacttgctatgattgcataccaatttttagccagttctctatggaaacttgggtttctggttttgattttaaaatttttgagagatttgctagattccaaatgaggatttggtgcttggtgtgtcagggaaaggacagtgtccatcttggctacagaaagggattttcataagccctctcttgtagagcttgccgtttaaaagcagcccacatctctgttgaagaatgggagacttgtattctgtgaaacagcttctctttgaatctaattgaacctaactataggcctcatctacaaatgatgcttataatgtgcccagcagcaatggtgtctgcatttttaaaaagaaagtaaaaaggagatgcttgtttctggcttatgctatgggctgaggtctttggggagaaataggaatgaggggttaagttcagattttgagaattcaggaattggtttctgtcaaatctaactgtttaattgtcactctagcaatatttcactgccaagaatttgaataagagtctttcccagcttttatgaaacagtatataaagaccatgagcattatttgaagatttttcatttaaaatgtagttttctatgtgtgttctctataatcagttaaatattacatgttctcttggctatatccaaccattttctttgaaaataatgctgacttcagagagagttctggattaataattagccagatgtgtctctgcctttgagttttggtctcaagcaggctacatataacttccaagtctagaggcaagtttttatactttggaaaacatagttcagttacctaatagagtccctaatttttggcatcataaggatgcctttgtaattagttttctatatgaaaccagtgaattgtagtgtctaacttacaaagctctattttctagggcttgccttcatcagtgggagaaaaagtgtgattttttttttccactttaaggctagccccagatgctgttgtgacacctcagctacacttaaagttggtgtggattccccttaaggcaggtttcccaggagccacctggcttttatttgtctcacacagttccaattgttcccaacggttatttcacacaaaagcagctttagttacctggttagacaggttggttactcctctaattcctactcatattcaggaagaggagactcttggctttggacattcagatgatcgaccctgcattagtttggctacagtgatgaggtggtttgctgatgccatctcttctcaagtcttttgcattctggtttgcacccttacatctgttttctccaacacctccagtcatctcctggctcctttaccacttcctttaaccacccataggtttttctctgtgctgggaaaaacgttctgtctcttgctctcctcttcatctatgagactattattccttcctttcactgtcaaacaaacttcttacaagtttttattcctaaccactacttcatttcctctctataccttcttcctccctacaatatggcttctatccccacaattggattgaactctctttctgaaagattttcagggaaaccttttttttttttcttgccaatcctgacttcacttgtccattccatgttttagatctcctgtcatgtgagcctccagaatggctccctccacagagttcccattttggtccatgggagctccaattttcacttaattaattcatgcttccagttttctttcaaagtacttctcatctgtccctttccattcccctggacaccaccctgctcctggcgctggttcctttgcatctggatctgcactctgcctctggatcgccctgttcccagtctctccttactgaaatctgccctatacaccacattgataatatcgttgttaaagcactattttactgtgtcattccttcgcttataaaccttcagtgccctttgccacctataagtccaaactcaggctggcttttcagatctttcataatatttccccacactacttagccaatcttatctcctactaacttctaaatgttaactctactcctgccaacttggtctcttcattgcttcccagatacgttgtctcacctgtatgcatttgtacatggcgtttgcattttctggaactccctccctaaatccttctatacatttttccaaaatatatcctccttccatgaagtattctgtaacccttctgatgaactcatcacttgcccttgttcttctaaacattccttacacacaaacaattcattttgacgttaccttgcacactcattgccagacgttgccacctgttttatatgtctgtcttctgaacaaaacaaattccctgttggcaaggacggtggtataaaccacctttgtatccttcaagaagcccaacacattgctgagtatattgcaggcctctaataaatgctttaaattgaaacgtggtaatgatgttttagaaagaatgagaatgaccatttgtgttttcttctctacctccagtcaagtatcatcacgtgggcaaactgctgaaggagggggaggagcccactgtgtactcagatgaggaagaaccaaaagatgagagtgcccggaaaaatgattaaagcattcagtggaagtatatctatttttgtattttgcaaaatcatttgtaacagtccactctgtctttaaaacatagtgattacaatatttagaaagttttgagcacttgctataagttttttaattaacatcactagtgacactaataaaattaacttcttagaatgcatgatgtgtttgtgtgtcacaaatccagaaagtgaactgcagtgctgtaatacacatgttaatactgtttttcttctatctgtagttagtacaggatgaatttaaatgtgtttttcctgagagacaaggaagacttgggtatttcccaaaacaggtaaaaatcttaaatgtgcaccaagagcaaaggatcaacttttagtcatgatgttctgtaaagacaacaaatccctttttttttctcaattgacttaactgcatgatttctgttttatctacctctaaagcaaatctgcagtgttccaaagactttggtatggattaagcgctgtccagtaacaaaatgaaatctcaaaacagagctcagctgcaaaaaagcatattttctgtgtttctggactgcactgttgtccttgccctcacatagacactcagacaccctcacaaacacagtagtctatagttaggattaaaataggatctgaacattcaaaagaaagctttggaaaaaaagagctggctggcctaaaaacctaaatatatgatgaagattgtaggactgtcttcccaagccccatgttcatggtggggcaatggttatttggttattttactcaattggttactctcatttgaaatgagggagggacatacagaataggaacaggtgtttgctctcctaagagccttcatgcacacccctgaaccacgaggaaacagtacagtcgctagtcaagtggtttttaaagtaaagtatattcataaggtaacagttattctgttgttataaaactatacccactgcaaaagtagtagtcaagtgtctaggtctttgatattgctcttttggttaacactaagcttaagtagactatacagttgtatgaatttgtaaaagtatatgaacacctagtgagatttcaaacttgtaattgtggttaaatagtcattgtattttcttgtgaactgtgttttatgattttacctcaaatcagaaaacaaaatgatgtgctttggtcagttaataaaaatggttttacccactatagtgtggtgacttatttaaatttttttaaaaaccttattctagggaatctgattcagacattttactttggcttaaaattcagtttcatttttgagtgcagagtttttgtattccaaaagaaacaaggggcaaaatttcatggagaccccacaccaaaaaccaaataccagcttgtcctgtttaagaaatagtga

SEQ ID NO: 138716 - DNA, 1089 bp, Homo sapiens
gttaattaagaaggtggttacaatattttagttgtattttactccttactaagccattcaattaaaaagtacaggataagttatcttcctcatttagggcctacccaccaaaaaggttgactctttataagacatatacaagtctagggttatacaaaatgtaaacataaaaccagtatttttactttcttctaagtcccaggatggtatttagcaaaaaaaaaaaaaaaaaaaagacaaaaatgttatatagaaatagcaccggttctattacacataaaaattgcacatgctgtattctgcaatttatttttatgtctgactactgagcagcaaactgttttcatgtctaaaaactctgcaaagaaaaatcaagtgacagaacacagtgagatttttttcaaaagcatagctgcttctcattacaaactcataatattctttgttttaatggcatgacacatgaaaaattaagaggcaggttttcgtcaaagaaaaataatacctggttactgaaagttgcctgacaaaatacaagctgttagcagttcaaaaggctactctggacaacagtactttgaacattaacattcaaggcacttgccccataagcaatgtttttcagatttgacaagccaaatctagttttgatggaagagtcactggcttgaaagtggaattgaacacaagggagccaacaaatcatccactggttattatcttattaataataaacatcatctgctatggtacattcatttctgacttcttgcatgtactaacatagctctatgattagaagagatcgatgaaacaacttgtggctcttccttcagataaataagcttttgtagccctttcacatacccgtttgctcaaaaggctggttatatgcacacattgtgatattctgggcaaccacaatgactggcattctacctggctctatcagctggtacttttctacagaatgtcaaattaagagtgtttgaatgaatcatgtcacatcaaagtgttgccctttactgcttctgtggattaaaaatgactttttcctgttgctgacagtctctaatctcattaatgtct

SEQ ID NO: 138717 - DNA, 1135 bp, Homo sapiens
gagcacccaccaggagaaaattaatcttattactatgtttaaatactcaaagagttgtctttttcaagacaaagtcttggaagaagaatctaaaagtggtccagattgtcctttgaggtttaaatggatagtatttaaacccattagcagagttgttgttttttttttaagaaccccatgtctttccattttagaaaaacagcaagattgaagtaatataaccactggaatttgcaaaaggaaatattgaaaaattgtggggcaccaatgatgtcacttgaaaaaagatgctgtgactattccacttcaggttatgtaaccctttcactcagggctggattacatcagtttgtaaagtcactgaatatcccccaaactgaactttattaaacagtaacaagtgcctctcttctcaatcctcagtgatgccatcaagttttcaaaaagagtaaagagaaaagcctatagttttgtagctagggaaaaatgtatatgtgtaggatttgtaaactctcaacataagcaattgatctttttacctactagtttttgacttcataaatgtttttaaattgaaatattttatggattcttaaagacttacatcttagtgcagtgcatgttttatagaaagctccgctgattcattctgccttaccttgcatttaggacctcaggggcaatcgattaccttttttttctccaacaaaactatgcctgacctggtaattgaagacattaatgagattagagactgtcagcaacaggaaaaagtcatttttaatccacagaagcagtaaagggcaacactttgatgtgacatgattcattcaaacactcttaatttgacattctgtagaaaagtaccagctgatagagccaggtagaatgccagtcattgtggttgcccagaatatcacaatgtgtgcatataaccagccttttgagcaaacgggtatgtgaaagggctacaaaagcttatttatctgaaggaagagccacaagttgtttcatcgatctcttctaatcatagagctatgttagtacatgcaagaagtcagaaatgaatgtaccatagcagatgatgtttattattaataagataataaccagtggatgatttgttggctccctt

SEQ ID NO: 138718 - DNA, 1050 bp, Homo sapiens
aagagtacaaaggacttcattcaattggagggtgaggctgaaacccgaagtttggttcagatcctgaaggcaaagttacatgggaagattatcaagctaaatggtttgaaaaaacacttaaaagtagtggctacagatgcccagggagaatgggagcacttccccaaggaaaaagagccctcgttgagtgatggggctgaagagcaggagaagagcccagattccatatgttttgaagagttgccctgtaaatggtttgcacctaaatgttctagcaaagagaagccatatgaagagatcctttgggtagtctttgaaagttttgggaagatcaagaatgtggatatccttatgcttggcccctacagagaagtgatgactgacaggagctttgggggttttagctttggcttacagacatttgaggcattcatacagtaacaagaggcaactgactttgtaaaagccatggagtccctttgaagaatgaaactgatgcttaaaggaaatgatgggaaagctctggcatgtaacattaaggtaagaagtagccagagtttcttttattttccactgttcaggtgatcctgaataaaagctggaaggaagcatctagaataaattttcttagaccctaccaggctctgatcaataactaatatataaagacttttattatttttaataaatggatgtttaggaagaaaaaaatcctgatttgaacactcattcttgtgctatcaggcatgctgccagctatgactttaaagtgatggttcttataatctgaggttctgtctcaactacttgagggcattaaagaattcttcatggcccctatggaattatctcatatgcttattatatttgacaagttgctgagagagaggaagagaggaatacatgcagtttgaaaccacatggaggccaggtgtggtggctcacgcctgtaatcccagcattttgggaggctgaggcgggtggattgcttgaggtcaggagttcgagactggcctggccaacacggcaaaaccctgtctctactaaaaa

SEQ ID NO: 138719 - DNA, 1053 bp, Homo sapiens
atttaatttttattgacacattgtaattgtacagaatttcgagagaaactctctataggcatgaaaaatgaggaattgtgttgaccatatcaatatctggaattgctaataaaacaggtgcaaaaatcagatcatgatggtatatacaatggtgtaaatcttacatgctgttcatgctgaatattgttaatatacagttgtcttaattttaaaataatttcattcgcttttgactttgtacctttttctctctggcactattccctggttaggatgccataacttcattttggtccactgtgaagagttcaagtgaattgtggcttctccagtctttcttcccttgatcacattttcagcacgaggtattggataatatcctattctgtgggacttgtattcaaataagtttaccttgggatttttaaaaggttgggaagtactgttactctcaaaaactgtgtaatagtgcaaagcagggtcccgtgtgaaggttgcttttgacctgtaggtggcgactggtgggcaggaattttgctggtaattttcagattgtggaaatacaactgagaagcaaaacactggcaacctcatgatacgcatttcccacaaataatactgattattcaatgatggaggcaaaagtatggaagatactcagccacattcctttaattccctgatagctttttttttttttcatgagaagagaaagcagtgagtcttcttcagtagcattgtttattaatccaaggtataaagcagcattcctggctggaggtgtctggagagaggtgttcttcaataaaaatgttcctggtgcagaagaaggggcaaaagaccaaaggactggtcagataggtctgctgactgctctgtgcaggtttttaaaaatagcttcttcccttgttatcttggaatgactcctatacacactagcttagagttagttatgtgaatgcatttgcacagaaaggccaacacaagacttttcttcaggctaatttattttctattagcctcagaaacactcagaacactttgcttccacaa

SEQ ID NO: 138720 - DNA, 1031 bp, Homo sapiens
gagatggagagaacaagggtaatagggagaagggtaaaaagctgagttgaaagaggtgggcgggggccatgttttgaaggtaagtagtttggatttcattcaaaacatgatgagatgctgctggagggttttgaacagaggagtgacatgatctgatttaggtttttaaaaatatgacattggctgttgtgtagagtagactctgtaggggcaaggatggaagaagaaggaccagttaggaggctgttgcagtaatccaggtgagagatcacagtggcctggactggggggtagcagcgaagatggagatgaatttgggatttgtggtaaaggtggagtcaaaaagacttttggaaggattaactcctaggttttgagcctaagcgcctgggtgcagggtggctctacttagggagctgggaatcactgggaatcaggggagcaagtgtgatgtggaggacaggtttaggagatgcaaattaagggctctgatgcacttgttaggttgagatgccaatgatacattcaactggagacattgaataggcagttgaatatcaatataaaagttggctggaactacagcctacataaaattaaatgcaaattaaagctgctttaagttgtcattttatactaataaaggtaacagaaataaaaatgataatgatccagtgtgatcaggactgcaggggaatcaagtatgttaataatgctgatggcctaataaattggcttttaaaaaatatttacataagacctggaacggtggttcacacctgtaatcccagcactttgggaggccaaggcgggcgaatcacttgaagtcaggagttcgagacaagcctggccaacatggcgaaacctcatctccaccaaaaaaatacaaaaattacccgagcgtggtggcatgtgcctgtaatcccagctactctggagactgaggcatgagaatcacctgaacccgggaggcagaggctgcagtgagctgagatcatgcccctgcactccagcctgtgaaacagagtgag

SEQ ID NO: 138721 - DNA, 1044 bp, Homo sapiens
ctgggttcaaatgattctcctgcctcagcctcccgagtagctgggattaaaggtgcacgccactacaccctgctaatttttgtgttgttggtagagatggggtttcaccatgttggccagggtggtctcgaactcctgacctcaaatgattcacctgcctcagcctcccaaagtgctgggattacaggcgtgagccactgcacctggccacatcattttatttaatcccacctgtaaggtaggcactattatcatcttctgaagctcaaagaggttaggtagcatgcccaaggatgtcaccaagctggtcagtggcagaggcgggatttgaacccagatctgcttgacaccagacctggagctcaaaagcattttggtttttactgtcacagagaaggttgcataaaagaggtgaaatggagcaaggttttgaagggtgagtaggctttagatgaggagatgggatatttggctgaggggatcaacatctttaaaggaactcaaggaagactggcccaactagaatgggggatggacacacgggtgtggtgaaaatagggctggcaaggtgggtaggatcatgttttggagacctttgaagggaaactgttacctgaagcagtaagaagtgggggatgttgagaattttggggcaaggaagagcatggcaaaggcagtatcagtcacctggtgtgaccagcatgtgcctctctcatcctcattctcatttctcattcttgagaaccttacccaatggtagcacatttagacattgtttttggatttcctgaacccctacagagtagcagacatgtgcaaccaaatacattcctgggtccagtgtgcagaaggaacacgctaggggccctgggtcaaactcagccttagatgagtgtgctgcggcctgcacaggatttgaaaaagcaattgaattagtggtcaatgttgaaaaagcaaaagaactcagtaaggatcaggatttccagcttatcttgaaatgctggaaggtctggtctgcatttcacttgtggagggcaaagctgt

SEQ ID NO: 138722 - DNA, 1033 bp, Homo sapiens
gagcttatgtttggctgcactggctgccaacctgttaggttgaagtattggcagttataattacacatatccagggtgtgtgttgtatctgtgctggctgaaaggaaggggttgctgcaattcaccagtgtatccagtctcactggaaaaagcttctgtgcatgtatgtgtgggggtgggaggaagaacagaaaagggaacagtgccgccctagcaaatcaaaagtttaagatgcatggactgagatgacatcattggcggattatcagggttgcctgccctgactctgagattctaaggggaacaattgataggacttatctctgtatcagatgggagaagtctgcgaaaaaaggacttcctatggttcttctttttaattgtgtatatttgatattgagactctataaaagaaactgatataaaatacggctcctcttcctagttcatcaagtcattcagtgaattaagggcctgtttcctctccgcttgcccctaccagtcatttccttgtcagaagtgttgaactcccttaggctctatgctgaggactaacacagggtctgatacattgtagaccttcaataaatgagtagtgaattaactatgccctagaagtgaccaagtgggatggggaataagagtgggacaaggagaatgaatggtatttctttgggcatttcaaactccaccttctaggtggttccagcttgctgcagaccgcccctccagtcaaaaatttctttttttttttttggaagaagtattgctctgtcgcccaagttggagtgcagtgacgcaatctcggctcactgcaacctccacctcccgggttcaagcgattctcctgcctcagccttccgagtagctgggattacaggtgcacgccaccatgcctggctaatttttgtattttcagtagagacggggtttcactatgttgaccaggctggtctcgaattcctgacctcgtgatccacctgccttggccttccaaagtgctgggattacaggcgtgagccaccacgcccag

SEQ ID NO: 138723 - DNA, 1031 bp, Homo sapiens
tttcaaatagatgcaaagtcatgatggttgtaaaaaaaaaaaaaaaatccaaagaggtaattgcactgttttcacaaaataggatcaacatgtaattatgaataacaatataaatgtcatccaaagatataggaagtgaacttttagggtttcagtgaaagtgttattttgcaggggttaataaacatactaatactttgtccaccctatgttaaaaaaaaaattcacccccaagacagaactgcaggctgcttttaaatgcaaacatggcattgggcttctctggccattagatgtcactgcagtaaatggagagtagctgagcatcacctgattggagcctgaagttcggtgatctctgtccagttaacaacttcataatccctgcttgaaatccatctttggtttggagaataagaggcctagaaaccacaggctaatgctaaacttgttggttttgttgttactgttacttgtcctacaaagcacacactccaaattcaccaagaagagagggctttaataacagtctgtcctcgctggagcaggcagggtttgccagcagaataagtaacgagggacctttgcagggccactgggctgctctgacctgagcacacttaatggcaacatttgcattccattggctttccccattgcactgcctgtcatgaagcaaatcaatggcaggtgtctgttggataacgagctacacagggaatttttctcgatccctgcactgactggcccctttgtctggatgtttctttctcttaatatgcttttctctagacacacacagcccatttaatggcacatcaggttggaactcttttgaacataatgacagtaatcagaagtcttgtttaaccagctgagcccttccttcaccatgcttacactcattttatccctttttccttttcttgccttggctcctggctggcatgctagagaatggagaggtaaataaattatgcatgtgcatgtcttgatagaatggcttctggtgggaaggggggtgggtcagg

SEQ ID NO: 138724 - DNA, 1028 bp, Homo sapiens
tcctcccgggttcgagcagttctccagcttcagcctcccgagtagctgggattacaggcgcctgccaccatgcctggctaatttttgtatttgtagtagagacagggtttcaccatgttggccaggctggtctcgaactcctgaccttaggtgatctgcccacctctgcctcccaaagtgctgggattacaggtgtgagccaccacaccctgcccttccacaagtattattaaatagatagctaaactcttgcagttgtcatgcacagaaatgttttctgagctgcagttttgattttttcttcattaaattaagtggggaaaataatacgcctgatttttctaatttcagaagaactctaaaactcttgttctgtttctaaaataaacttccagctaatttcattttctttggattatgaagagagagttctgcctttctgctttatggctgacagtgagcaccacactggactaagtacttgagaaggattataaagatgtgtgatgcaatgttgactcaggaggaatttatggtcttgaggaacaaatcatacctacatatatgaaatgactatgattacaaagcaaatacaagcaaaggcatgataatgtagtatgaactgttcataagattgccaagaagctctatacaaacttagtgaataaaaaactaaagggatcatcacatgggagagagactagtgatcaacagggatttggggaggttgtgagtctttttttttttttttttttgaaacagagtctcgttctgttgcccagcctggagtgcagagatgcaatcttggcttactgcaacctccacctcctggttcaagtgattctcgtgcctcagcctcctgagtggctgggactacaggcgcctgccaccatgcccagctaatgtttgtattttcttggtagagacggggtttcaccatgttggccaggctggtcttgaactcgtgacctcaggtgatccacctgcctcagcctcccaaagtgctgggattacaggcatgacccacc

SEQ ID NO: 138725 - DNA, 2596 bp, Homo sapiens
ctctagagggcgctcctgggctagcgtgtagggctggcggcggcggcgctcgggtcacctctgggagcggagtgggggcggagcgagacggaagcagctcaggagacttgaggcgtaggctgcggtccccaaggtgaccgcgccctatgtgggactcgccctaatgcctctgaacctgggtttgaggtaatgacctttctcctaggtctgaaggtcacgggtccgctggaggatgccccctctccactcagaggggtggaggcttaatgctactggtgcagatcacctcttcccctgtgacagcctcagagggttgggagggtccagccagtatgatatacgaagactagatttgagagaggggagcctaccttaaagggcattgatcgagatggcataagctcttctctttcccttccccatggttataactgtccctgttggcttccttcctgtctgttaggtgcagcatgccagcaagcagatcactgcagataagcaatacaaaggcattatagactgcgtggtccgtattcccaaggagcagggagttctgtccttctggcgcggtaacctggccaatgtcatcagatacttccccacccaggctcttaacttcgccttcaaagataaatacaagcagatcttcctgggtggtgtggacaagagaacccagttttggctctactttgcagggaatctggcatcgggtggtgccgcaggggccacatccctgtgttttgtgtaccctcttgattttgcccgtacccgtctagcagctgatgtgggtaaagctggagctgaaagggaattccgaggcctcggtgactgcctggttaagatctacaaatctgatgggattaagggcctgtaccaaggctttaacgtgtctgtgcagggtattatcatctaccgagccgcctacttcggtatctatgacactgcaaagggtaagtttgctgtgggctttaacgttgtgttcttaggagacagtttaaaagagcattgtaccaacctaacagtccaagagctaaagagttgtttttttaattgctaaaggaagccaagatcatccaatgcaacccttgtgtacagatgacgtgtttaggggatgtggggaaaggaagtcagtaaaactctgctttttggtaaaagcatctctttcctattcccaggaatgcttccggatcccaagaacactcacatcgtcatcagctggatgatcgcacagactgtcactgctgttgccgggttgacttcctatccatttgacactgttcgccgccgcatgatgatgcagtcagggcgcaaaggaagtaagttccacttgagcagaagataaagttgtagtcgtggggcaatctgctgccacaaactggtgatacatacctttaaaatggctgtctgtccaagtcaagggatggggttgatagcatctgtgtctgttccacaactgcctttgagctggcccttcagatgcctatgaatgagggtgcttaaatggtgttagaggttaagaccaatgggtagtctgtattcctgtggtcatagcattaatatttcagtgttgcccatgctaatgtgtgaatgttggatttaaagctgacgttcttagaggtggggctctgctttatttagcctagtgaatcttaggatttttcatcggccttcagtcactaactccatgtctttattctttgcagctgacatcatgtacacaggcacgcttgactgctggcggaagattgctcgtgatgaaggaggcaaagcttttttcaagggtgcatggtccaatgttctcagaggcatgggtggtgcttttgtgcttgtcttgtatgatgaaatcaagaagtacacataagttatttcctaggatttttccccctgtgaacaggcatgttgtattatataacatatcttgagcattcttgacagactcctggctgtcagtttctcagtggcaactatttactggttgaaaatgggaagcaataatattcatctgaccagttttctcttaaagccatttccatgatgatgatgatgggactcaattgtattttttatttcagtcactcctgataaataacaaatttggagaaataaaaatatctaaaataaattttgtctgcagtatattttcatataaaaatgcatatttgagtgctacattcgaataaatactacctttttagtgaatgctacatttttaataaatgctacagtatctccggagatgaagaactgtctttttaaaaccaattgtcagcagtccgcttaacagaataacttggttgtgccacccacaaacatttccaacacattagcaaaggaattcaggcccagtgcatccaaaaaacattgttccattgcctatggatgatcatagctgaatgagctttctccaagaaatactgtgaacccaccttctctagtcctatggttattaatcatgagccatgagctgaattatccactttaaaatggttacgtttgttgcatgaatatcacctcatttaaacttttagaatcaataccaatttcatccagttgccttcattttcacctggctcaagccattttttttttttttttt

SEQ ID NO: 138726 - DNA, 1112 bp, Homo sapiens
atacaagacaagcacaaaagcaccacccatgcctctgagaacattggaccatgcacccttgaaaaaagctttgcctccttcatcacgagcaatcttccgccagcagtcaagcgtgcctgtgtacatgatgtcagctgcaaagaataaagacatggagttagtgactgaaggccgatgaaaaatcctaagattcactaggctaaataaagcagagccccacctctaagaacgtcagctttaaatccaacattcacacattagcatgggcaacactgaaatattaatgctatgaccacaggaatacagactacccattggtcttaacctctaacaccatttaagcaccctcattcataggcatctgaagggccagctcaaaggcagttgtggaacagacacagatgctatcaaccccatcccttgacttggacagacagccattttaaaggtatgtatcaccagtttgtggcagcagattgccccacgactacaactttatcttctgctcaagtggaacttacttcctttgcgccctgactgcatcatcatgcggcggcgaacagtgtcaaatggataggaagtcaacccggcaacagcagtgacagtctgtgcgatcatccagctgatgacgatgtgagtgttcttgggatccggaagcattcctgggaataggaaagagatgcttttaccaaaaagcagagttttactgacttcctttccccacatcccctaaacacgtcatctgtacacaagggttgcattggatgatcttggcttcctttagcaattaaaaaaacaactctttagctcttggactgttaggttggtacaatgctcttttaaactgtctcctaagaacacaacgttaaagcccacagcaaacttaccctttgcagtgtcatagataccgaagtaggcggctcggtagatgataataccctgcacagacacgttaaagccttggtacaggcccttaatcccatcagatttgtagatcttaaccaggcagtcaccgaggcctcggaattccctttcagctccagctttacccacatcagctgctagacgggtacgggcaaaatcaagagggtacacaaaacacagggatgtgg

SEQ ID NO: 138727 - DNA, 1050 bp, Homo sapiens
attctcctgcctcagcctcccgagtagctgggactacgggtgcccgccaccacgcccggctaatattttttgtatttttagtagagacggggtttcaccgtgttagccaggatgatcttgatctgacgttgtgatctgcctgccttggcctcccaaagtgctgggattacaggcgtgagccaccgtgcctggccgagatggagtttctctctttcgcccaggctggagtgcaatgacacaatcttggctcactgcaacctcccccttccagtttcaagcgattctgcctcagccttttgagtaactgggattacaggcgcctctcaccatgccgggctaatttttgtatttttagtagagacggggtttcaccatgttggccaggctggtctcgaactcctaacctcatgatctgcccatttcggcctcccaaagtactgagattacagatgtgagtcaccacgcctggcctcaagccatttttaattccattcagagtagaggattagagctggcacagttacatagtgctgagattgcagtgctgttaaagattatgaagagggccagacattggccacgacctcaaaactaaccttacaaagaggaaatagcatctgccttttgcttcatgctaataagcccagtcaatggagggcatttatgtttattttcaataaacccttatttggaatccatgtgacagtgtttggactttctgtatctcttgattagggctcaaatccagtggattttgccatgagatttgtactaagaatgcagcattatgtctgtcaagccacaactttaaaaatgatagaacgggtgctccatgtgtacatgtaaagctcattcttgaggaatatcccacacactggcatgtataagagctattcacagagaggtctgcatggcatggatgaatgcccaaggatcccagagtttatgtttgtcctctggccaggcacctgaatcgtagtatagcttagttattaagaattctgttctggtatcaaagaggcctgggctgaagttctggactctgatgtt

SEQ ID NO: 138728 - DNA, 1065 bp, Homo sapiens
cttcactcctgagcccagtgagaccacgaggctaccaggaggagcaaacaactccagacgcgctgccttaagagctgtaacagtcaccgcgagagtctgcagcttcactcctgagccagcgagaccacgaacccaccagaaggataaaacttcgaacacatctgagcatcagaagggacagactccagacgcgccaccttaagagctgtaacactcaccgcgagggtctgcggcttcattcttgaagtcagtgagaccaagaacccaccaattccggacacatcaagaggctgaggcaggagaatcgcttgaacccaggaggcagaggttgcagtgagccaagactgcgccattgcactccagcctgggcaacagaacgagactctgtctcaaaaacaacaacaaaaaacaagttctgttatttgctttctctgccctacctgtcctttcatccccattgccatcaccctagcctgtcactaatccctttgctgttgcaacaactgcgatacctgtgtctcctcctcctccacttcaacccacacctcacaccacatctgtgttgattgtctaacccattgtccacatctgtgttcatcgtccaacacccaccctactttgtgtgcgaagctccccattgcctacacggataaaaggttcaaggccccaaacttcctctcagtcaacccgtattagctgatgacctactgtatgcaaagcactcctccgaaatctgcttcagcctaaggggtgtgatcacaatggccaccaattgtccttgagggttgcagcaggctctttactcacattgtatcatgtaatctgtttttttggagagggagtcttgctctgtcgcccaggctggtgtgcagtggtgcgatctcggctcactgcaacttccacctcctgggttcaagcgattctcctgtctcagcctcttgagtagctgggactacaggcatgcaccaccacgcccagctaatttttgttgttgctgctgctgttgtttgtttttttgagatggagtttccctctgtcgcccaggctggggtgcagtggtgtgat

SEQ ID NO: 138729 - DNA, 1059 bp, Homo sapiens
gaaggagaataacttgtttatattaggcaaggccccagtagcttctttgtaaatttcagtctggagaaaataaagccagagctgcaagtccaaacaggtaaaaaaaaaaaaaaaaaaattttttttttttttttgagacggagtctcacactcttgcctgggctggagtgcaatggcgcaatctcagctcactgtaacctctgcctcccagcttcaagcgattctccttgcctcagcctctcaagtagctgggattacaggcacccgccacaacgcccagctaattttttttgtaattttagtagagacgaggtttcaccatgttggccaggctagtctcgaactcctgacctcgtgatccgcctgcctcggcctcccaaagtgctgggattagaggcatgagccaccgcgcttggccccaggtaaaattttgataagctcatgaaaatttcaactagagagttcaggcacccatggctgggatgagggcaacaaatctggagcaacaaacatgcaaccaacaagctttttttgacagcatacttttgtttggcactcctctacgcactgggatacaaatatgagtaagaatgctaccacctaaaataatagatgcctggataggcatagcttatctctggaaggtaacaccagaatgtggtcatggagattacctgtgggtggcgagggaacaggggtgggagggaaactaacttgttactgtaaaccctttataccttgtcaatttggtatccgaggatatattaccaatatattacccattcaaaagataaatgtggtatcagggagacacaaatacgtaaatgtgtaaatagagaagtaaatagcagcatcagctcacaaaagcatgttcacagtgctagagttattgacaacaatggaggaaccatgatataaagactgaatttactagcccaggcatgatggctcacgcctgtaatcccagcactttggaggcccaggccggcagatcgcctgaggtcaggagttcgagaccagcctggccaacatggagaaaccctgtctctactaaaaata

SEQ ID NO: 138730 - DNA, 1050 bp, Homo sapiens
ctcaagtgatctgcccacttcggcttcccaaagtgctgggattacaggtgtgagccaccgcgcccggccgagatggagctttctctcggaagtgtttccagattccccaaatgtcagttagttaaacattcttccttctttgctcccaaatctcagtctgctgacccctcttaacactcttgtcacactatattgtaattcttacttctctgcctccttcactgggatataagctccataagggtaggattttttctctcttcttctctgctgtgtatcccttgctcctagtacagtgcctggcccacaatatctgttcagcaaatgtcaagtcaataaatagtttggtcttatgttacagcttgttttaattccactttattaaactaataaactaattccatttatatatgtgtgactggcttctctggcagaggacaaagtccttaagggaaaggactatgcttaagtcaactttgcatcctcttcccctccccttggtacttggtacaggaccttgttcataacagacactcaacaaatgttcactgaatgagtctgtatgtgtatattggttgttaagggtacactttttttttttcctttccatagaactgcacaaaactgtttgtgagcaagatctgagaagcaagcgatgtgctttttgaacgcctgctgttctggcacacctgggcccaaccctgactgagcccgaggcacaggaaggaaatgcagttgcaatgtgattagggtcatgagggtttctgtaaccgagggacgccaaaacctgagtgagtctctgagggcgatcaagggttgcccaggacctatcctgaagctctgaagccttcctagatgacagtctctgactcctcctatggaatccctcataggagcccctggccgggctagatccctaggataggtgagctgactttggaagtctttctggtgcaatgtcacttggaagtcaagctgtttgtgttgggataatgtagaaagaagaagcctgaagagaaggcctaggaggggctgggctgacaatccagc

SEQ ID NO: 138731 - DNA, 1045 bp, Homo sapiens
ggctgaggcacgaaaatcacttgaacccgggaggcagaggttgcagtgagcagaggtcatgccactgcactccagcctgggtgacagagcaagactccatctcaaaataaaataaaataataagatatatatatttctatatatttctatatatatatttctatatatagaaatatatatatttttatatatatatatagcatccccaagatttagaatcagacagacctgggtttgaatcttgatttttcttcttattaactgtgacctcaggcaagtggcttaacttctctaggcctcagtctcctcattaatagaatggggaataataatacctgcttttctggctgttctgaggatttattcactcatttgaaagatagtggcatgcctgtcctacagttgttactaggttcaggggatacaagagattcaacgcctggcacatagtaagtgctgaattaatgataacttgtttttgaaggtcatgccacgaatttggactcaaaatagcaggcagttgaaagcattctgaaaagagaagtagtaagaaaaaaacactactttttttttttctttctcaggcagggtctcactgttgcccaggctgagtgcaatggcacaatcatagctcactgcagcttcgacctcttgggttcaagcagtcctcctgcctcagccttccaaagtgctgggattacaggcgtgagccaccatgctcagcaggaaaacaatattgaagaggcttcacccctacctgcagtgtagaggcaggattgaaaaatgccagccttatcattttcatagagttgttctgaacatcataaaatagggcagagcaagaggcctaagactaataaatagtcgggagttgaacccatattgcaactggggacagggactgctcctaaaatcatagggccacagtctgcctctcccctgggaagcagcaaggggaaggaggggctgagaagaagccttctgtctgctcactggaagctgaggggcttcattttgccgatcacctggcctgtcttcgggcagt

SEQ ID NO: 138732 - DNA, 1170 bp, Homo sapiens
tactatatagagagagtatatatatatatatatttttttttcttttttttttgtagggacagggtttctccatgttgcccatgctggtcttaaactccaggcctcaaatgatcctccctcctcagcctcccacagtgctgggattacaggcatgagccacggtgcctggtctgaaagtgttttctttcagaaggaccagagggaacagatggccagagcccatcatggctccgtcatgctgtctccaaggacaaatggaatattctggaggaagggtggactgtgtaagctctacaggtcaattctcaatctcagcttgttcctgccagctcagcccttattcccaattgaggagaaagaggaggttcaaggaatatcctgctttttttccaggagtttcagggctgggcatggggtagggactcaagtcatgcctttggaatggagctggaggagtgtgagttaataggcactcttgtgggggctctcctctccctttccccatggggccagtcaggacttggagggcttctggctgtggaactggtttggttcccctgcttcttggtaccattcccagtctccacttgttcattcattctgacctcaactcctactccagtccctatcagctcactctgctccagccacagtgatctcctccctggccctcagacatgccaggcacattcctgccttgacattttttcctcaggtatctgcaaacggcccaccctcacttccttcaggtcttgattttgtctgagaaaatgtcattttctcagaggattttgctgaccattgtatctaaaatttcatcgcctcctcatacttcctatccccctctcctcctatagtttttcgctaaaaccctatataaatatttgctcattttgctcattgtctggtgctcccactataagctaaaagtttagtggggacagggattttttctgttgttgttcactgctataccccagagtctagtagagttccgggccgggcgttgtggctcacgcttgtaatcccagcactttgggaggccgaggcgggtggatcacttgaggtcagcagttcgagaccagcctggccaacatggtgaaaccccgtctctactaaacatacaaaaaattagccaggtgtggtggcacatgcttgtagtcccagcta

SEQ ID NO: 138733 - DNA, 1004 bp, Homo sapiens
agaagcaagtgttttacatgactcgaggtccagttaagaaaacagaaaacaactttgggaggctgaggcaggtggatcacctgaggtcgggagttcgagaccagcctgaccaacgtggagaaaccccgtctctactgaaaatacaaaattagccgggcgtggtggtgcatgcttgtgatcccagctactcgggaggatgaggcaggagaattgcttgaacccgagaggcggaggttgtggtgagccaagatcacaccattgcacttcagcctgggcaacaagagcgaacaaccgttttaaaaaagaaaaaaagaaaacaaaacgtattcagagttgtaaacagaatttaacatgaggaactggtactcaggggatagaagaccttagaatcccaggaagggatgatgaattgatccagagatttagcaacagcaggaagctacttcacctctagggctggagggacaaaagcagaaggtggtattacccaagtccgggatcaaggaccacccagcagaagcaggaacaccagcccagcaggagcttggtccatggagggagtgactatctagtgggagccacagaagagataacagtctatgctggagatgacgctcaaaacagagagaaagggaggaaataccctggcttcttcccttctcttgctttccagtcttctgccaaagattcccattcacaggccaaacctctcaggaagtcaggagggaaaggagcctgggaaatgttgtctgctgcacatagcagagcaggggaagagtggaatggggccaggcacggtggctcacgcctgtaatcccagcaacttcgggaggctgaggcaggtggatcacttgaggtcaggagtttgagaagcggggaatgagtctgagagcaaatagacaaatgaccagcctgtgtttaaaggaggaggaaatgatcatctgccaaatgccacagacaagatgaggacttggaaatgaccactgcatttagcaatggggagg

SEQ ID NO: 138734 - DNA, 1022 bp, Homo sapiens
ctgcctcagcctcctgagtagctgggactacaggtgtatgctaccacgcctggctaatttttgtatttttagtagagacggagtttcaccatattggccaggctggtctcgaattgacctcaagtgatccacccacctcagcctcccaaagtgctgggattacaggtgtgagccactgctcccggcctccagtatacattttagaattggcttgttggtatctccagtattctttctgggattttgattgggattgtgtaaaatcgaaaaatcacgttggggagaattgacatcttaataatattacatcttccaacccatgagcaaagtgtatctttccactttccatttgtttagatctttgatttctttcatcagtgttttgttatttttttcgtgtataggtcctgcagatattttgtttaaatttatacctaagtacttcatttttccggtgctattgtagatcttaccttcttttaaaactataacatctgtcctacaaactctcaatttagaatcagtcctacaatatgttttgtctgatgtcttacccaaatagttgagtgttcatgtcttgtcaatgagtggatatttggcactgtgaatttatggttccagtgtcagatgggttcttaccacagctagtcaatcctaatgtatgttttgggtcagcaactctcctgtttccctaaggaacagtttacagctgctttcttcaagcctctccctgcaagctctctctcttggtagatgaccagagagggatctccaaagcaccagcaacttaagggcacacttagttgtgtctgcctccatctttttctctttcaaatctcagaggaagagatccccctcttcctacttaaggctaatctacttttagtcattcaactagtatacattgagtatctattatatgccagatattgcactaggagctgggggcatagtagagaacaaagcagctcacattctgagggcaggggtgacagatgaacaagtgaacaagaaaattatct

SEQ ID NO: 138735 - DNA, 1056 bp, Homo sapiens
cagtttcttcatggtatcttgtaattttaatttgcatttccctaatggcagatggtgtggaacatactgttttcctttttttttttttttaaactgtggtaaaaaacacataaagtttaccatcttaacctttcttttttttctttttctttttttttttttttttgagacggagttttgctgtcatagcccaggccggagtgcaatggcgcaatctcggctcactgcaacctctgcctcccaggttcaagcgattctcctgcctcagcttcccaagtagctgggattacaggcgcctgccactatgcccggctagtttttgtatttttagtagagatgaggtttctccatgttggccaggctggtctcaaactcctgaccttgtgatctgcctgccttggcttcccaaagtgctgggattacaggcgtgagccaccgtgcctggcccatcttaaccatttttaattgtgtagttcagtagtgttaagtatatttgaattgttgtgatacagatttccagaactttttcatgttgtaaatctgaaactctatacctattaagtaacaactccccctttctctctccccacaacccctggtaacaccattctactttgtgtttttatgaatttgactactttagatatctcatgtaagtggaatgatacaacatttaactttttgtgactggcttatttcacttagcataatgtcctcaatgttgaatcattagaaaggaagaacaccttcctttctaaggctgagtaatgttcccttgtatgtctataccacattttgtttatccattcatccgtcaatggacatttgggttgcttccaccccttgctattgtggaatagtagcacaatgaacatgagtgtgcaaatatctctgagaccctgctttcaattctgatatatacccaaaagtgaaattgctggtagttctatttttaattttttgaggcacctccatacatactgttttccacagcacttgtaccattttacaatctttttttgtttgtttttgagacagagtctcactctgtcaccc

SEQ ID NO: 138736 - DNA, 2824 bp, Homo sapiens
ctggctaatttttgtatttttagtagagacgggttccaccatgttggccaggctggtctccaactcctgacctcaaatgatccacccacctaggcctcccaaagtgctgggattacaggagtgagccaccgtgcccagccttgccctgctttctaggagatggagttttctgaatttttctgtatttaggttttctgtactattttttgtccacttgatgcaaacttcttcagctgtgtagaaactttatgaatagatgagtgcttgagtgtctccagtctctaaagtggctgcttttattctttcttcaaagttaataacatgttgcaagatttttggacaaaatattatggtgtgtcataggaaaagcaccatgaattatatttaggtatagcaagtcagatcctttgaagtgactctgtctctgttcttagaagggttcttggaattggctgtggtttgaatctttctactgtcagaggagacccattaaaagccagaatctgcataaagctttctttacttcaaacactgaagctgtaggcgagccatcccgtatcgactttatactcaaagaaggaaaagccagattgcagtgagtgggtaggacagctcagatccaaatgaaagtagggtctcaagtaacccaagggtggccgggtacggtggctcacgcctgtaatcctagcagtttgggaggcagaggcgggcagattgcctgagctcaggagtttgagaccagcctgggcaacatggtgaaaccctgtctctactaaaatacaaaagaaattagccaggtgtggcggcatacccctgtagtcacggctacttgggaggcagaggcaggagaattgcttgaactcgggaggtggaggttgcagtgagctgagattgcaccactgtactccagcactccagcctgggcgacagagtgagactctgtctctacaaaaaaaaaaaaaaaaaaaagtaacccaagggagggagctaccctctagtcgggcagctgatactgcttccttgcatggatacatgggagggagacgttatagattaagaaatgatagcaagataaacaaaatgatttgttgggtatcttttactttacatttgttatttgcagaggagtgttgtatatatagatgttattttatgtcacactgcttcaatgatacctatatccatgtgtttgtatccatgtttttatccattcaactgtattaaaaggtgttgggacaggagttgtgttaaccttcttgtattatctacaaaaagttgcacttagtaggtgcccaaggcaggttcgtgaggtgctaccgggagatgatagtaggatagtagggcaggtttttttttgtttgtatgtttttgtttttgtttggtttgtttgtttgttttgctttttttctgatctccttatttgcaaggcaaagtaggttagatgtgagctagcaagaactgggaaaaagaggggtgggggtcccaggaaggcccaggatggggctgtgttaccttcttcccagttattttcctgtatccagtgaagtcttcgcaaccaattcttcctctctaccttgtttcccgtcctcattctgagagataattaaccgtcatgtggatgagaaaccataaccttacagttccttaacctcaactccagacagtgacctttacctttcctgcactttagccacaaactcccataccacagcctggatgtcatccactccacctctgaaatccagtactctgctctctgaccacaacctatccttgctactctcatgtgctcacttcctctaaacctattttattttgtttttagatttgaagggtgattattttattaacagtaataatgaaaaaatagtagtaagaatagcaacaataatactagctaccttttattgagcacttactatgtgttggatgccatggaaagcactttacaggtattatcttaatctaaacaacacgacatcctacgggacaggattaactgttaccatccttgttttagaaatgagtactccgaggctcagagagttttaagtttctcaagatcctatagcccagtaagcaataaagccaaaaatctgactctaaaacctgagctcttaactatgctgaactccctctatgaacttaaaacatatatgttattcagaacagattataatttcattttgaaaaataaagtgcaaagtcaagacagttgcatagaggaccccctgtagcaagtgtatggttacctttctacatattttctgaaatacttgtctttagatactaatcctaaaccatttcaacatctggttgaaattacacatgttgcttcatctataagactgtaaaacgtcattagcaccaagcaagcatatgcttttcattatgttttactcttttttttttttttttttttagagatggagtctcgctctgtcgcccagactggagtgcagtggcacgatctcggctcactgcaagctccgcctcccgggtttacgccattctcctgcctcagcctcccgagtagctgggactgcaggcacctgccaccatgcccggctaatttttgtatttttttttttagtagagacggggtttcactgtgttagccaggatggtctccatctcctgaccttgtgatccacctgcctcagcctcccaaagtgctgggattacaggtgtgagccaccacacctcatatttaaatagttattaaaataacatgatatgttagtatttagtttctctattttctttattaacttgtattttaacaggaaatacagcgttttgctgttggtatgaagagccatgt

SEQ ID NO: 138737 - DNA, 1200 bp, Homo sapiens
cccaactcgtggtttgtgagtctgtcctcagtagtagtagcaattacctttatggttcttcagtataacgatattgatggcaagatgtcatctgctgttttacatatgttttggttaaaacgtaaatgctactgaagaatcacttgaacccgggaggtggaggttgcagtgagccaagattgtgctactgcactccagcctgggcaacagagtcagtctctgtctcaaaacaaacaaacaaacaagcaatcaaacaaaataccctaagtgctcctggattactgaaaagatggagaatggaaaaggaacagagtcctgccattttagtcatgatttcatgatttgagtagtatacattatgacttaacgtctttgttgttattccttggtgagacttccggtttaaggatgctccttttttccttcagagggaagttgctgactcatatgcacagaatgccaaagtgattgaaaaacagctggagcgcaaaggcatgagcaagaggcgactgcaagagctggtgagtagcaaggggtagcaaggtgctggggccctatcatttggatgtcttggtctgaaagacctttcagcaggcagggaaatcttttaggaaatctgttgggaggttttagagtagttggctgccagttttataaccctggtctgtgactgtcagtataccctactctgtagtagtgaccccaggatctaggccttaaatgatgatacttgttatagccctaactaggatgatattttattttctgtattttatttttattttatttatttatttattttggagctggaatctcactttgtcgcccaggctggagtgccgtggcgtggtctcagctcactgcaacctccgcctcccgggttcaagggattctcctgcctcagcctcctgagtagctgggactacaggcacgtgccaccacacctggctaatttttgtatttttagtagagatggggtttcaccatgttggccaggctggtctcgaactcctgacctcaggtgatctgcccgcctcgggctcccaaagtactgggatttcaggcgtgagccaccacgccaggccaggatgatattttaatctgcttcttgtggtccaagatcaggagttaaaggtcagggtttctggacgttgtcccaggatgtaatggcacatgatagggctaccttggtagtaccag

SEQ ID NO: 138738 - DNA, 1107 bp, Homo sapiens
ggagatacctgacctgtatcaggggctccataaatgtttgttgcaggaagggaggaatgttgaaccaatgagttgacctatgaaatgaaaacttttttttttttttttttttgagacggagtttcactcttgttgcccaggctggagtgcaatggctcgctctcggctcaccgcaacctccgcctcccaggttcaagcaattctcctgcctcagcctcccgagtagctgagattataggcatgcaccactgcgcccggctaattttgtatttttagtagagacggggtttccccatgttgaggctggtctcgaactcctgacctcaggtgatccgcccgcctcagcctcccagagtgctgggattacaggcgtgagccaccgtgcccggcccccaaatgaaaacttttgaaagggcctcttagcgtttgaagaaatgggatagtaaggttgatacataatgagatttgttcatatctttttaacttccattttctgtgcagacctgaaggcattgaacgacagtacaggaagaaatgtgcaaagtaagtattaacaatgtgggtttctccaagcataggcaagtagaggcataatgtgttaggaaaataattatttggatacaactctccattatgtctttttttttttttttgagacagagtcttgctctgtcgcccaggctggagtgcagtggtgcaatctcaggtcaccttaacctctgcctcctgggtttaagcgattctcctgcctcagcctctctagtagctgggattacaggcacatgccaccatgcctggctaatttttgtattttagtagagacagggtttcaacatgttggtcaggctggtctcgaactcctgacctgagttcatccgcccacctcagcctccaaaactgctgggattacaggcctgagccacctcgtccgacccccattatgtctttatccttatcaactgccttcagacttcaactatgcacaaataccaatatgttccccaaagaggctagtcaaagttgtatctttgaccagctggccagaaaaatgaatttttttttttgagacagagtcttgctcttgttgcccaggctggagtgcagtgg

SEQ ID NO: 138739 - DNA, 1264 bp, Homo sapiens
cctcggcttaccgcaacctccacctcccagattcaagcaactctcttgcctcagcctccccagtagctgggatgacaggcgtgcgccaccacgcccagctaatttttgtatttttagtagagacgcagtttcaccatgtcggccaggctggtcttgaactcctggcctcaagtgattctccctccttggcctcccaaagtgctgggattacaggcataagccactgtgcccggcccctccattgccatttgatagccgtagtttgtttacaatttacaggtttgaatgagttcattcaacctgtaatcttgtggagcataccgtgtgccaggcactgagctaggtactggatctgtgaagatgaataaggtatgatttttaccattaaagagctcatgactttgagggaatgactcctattgtgataggaaaaaatactggtcttctgaacgaaaggaaaaacaggtgggagtgggtcatttgtcctgaatggtggccaggaaaggcttcaaaagatgatggcatttgtgtttagcctgaactaggatttcaccaagtagatgaagggaatgaagagcattccaggtggaaggaatatggaagcattaaaagcatcaaacatggtgtgctttagaaacctgaattgtcgtttgtgactggagcacaggttactttacaggaacggcatcatgcatactagggtgaggacagagtaaagtgctgaagtggacaagtttggccttaatctgtaggcaatgaagagccatctccgtttttttttttttgacggagtttcgctcttgttgcccaggctggagtgcaatggtgtgatcttggctcactgcaacctccgcctcccaggttcaagcgattctcctgcctcagcgtcctgagtagctgggatttcaggcacctgccaccacgcctggctaattttttgtatttttagtagagatgggatttcactatgttggccaggctggtctcgaacttctggcctcaggcgatccacctgcctctgcctcccaaagtgctgggattagaggggtgagccactgcgcccggcctatctctgttttttaagcaggggtgtgatgtggttagctctgttttagatttgggagtttggtatatatgggaaattgaaacctgggaagggataaaattacagagtgtggagcaagcagataggactgaatatttaaaaggcagacaaaagaattggaacagaaccagaagaacctggtgatgcagaaaataggag

SEQ ID NO: 138740 - DNA, 1023 bp, Homo sapiens
ctctcctccccgggcatagtgcgcgctttcatgaatgatctggtcacaaaacaaacaaaaacgaatagaaaaagaaaaaaagagaaaaagaaaaaaagccgaaaacttcccagggtttgccttagaattagcaggtggggatggaccccgttccaccacgagctcctccagcgcccggggctccggcgtaccctacgcctctgcgctcgcggccccgccccgggcctcccgtggggctttaatgacataagcaactttcctcgcgcaccccccgccccgtcttggtacggcctgtccggcgctcgacgttccacccccctctctctgctctcaggttggttcagcccccgtctacactggggtggtgcttagccggcgccagaccgaccctcgacttcggagaggcagcgcggttcctctgggtgcttccgcctccccttctcctgcttctccagcctcttcggcctcctcgcccgccgcgggaacccgagaccccagtgtatgccccacccctgaccccgctcgcgacatgtccaccccggctcggcggcgcctcatgcgggacttcaagaggtaaaccgaggggacggccgaggccgggggttgcgagctggggcacagggcgggtcccgaggcgcgccgggcggggagggctggggagcggccgggagcgggcgccagtgccggcctagggggacccctgtctgtcttcccgaaggttgcaggaggatcctccagccggagtcagcggggctccgtccgagaacaacataatggtgtggaacgcggtcattttcgggtgagtctgcgttcgtggcggtggcgagaaaactggggacgcgagcagcttcggtctgcgctccggggcgggccccccgcggaggccgagcgggtaggggaaaatgtttgggtctggctgggcctaggcgcctccccggagcctgtgcctcgattagctcagttcccgctgccagggggaaccgcttggggttctaggggggcggggcggggagtggtggcggt

SEQ ID NO: 138741 - DNA, 1406 bp, Homo sapiens
ggctaattttttgtatctttagtagagacggggtttcaccatgttggccaggctggtctcaaactcctgaccttgggatccacccgccttggcctcccaaagtgctgggactacaggcttgagccaccgcacccggcgagcactagttctttatacctgagctttaaatgtacagattaactgtgtttgctttagctctagtaggccttgttttcattggcttcttttttcctcgttttactctgttttatgctgggcacagctttattaatagtacatcactttgctggggattggctacctaaatatttcaagggtgcttctcttaagtggtatgaattgaaaaggtacttacagagtccattatctaccaggactgtcacctttgacattactggttctatttttgatgatgtgtatctccatcctagcattactgaaaggaattactcaggctgatttgttctgttgaacagtctgctaccgatggatgcttcctcaggtgtctggaacactgtggcctgtggttcccccacaaaaaaaattttagcttttttttttttttttttttttgagatggagttttgctcttgtcacccaggctggagtgcagtggcacgagctcagctcactgcagcctctgcctcccaggttcaagcaattcttctgcctcagcctcccaagtagctgggattgcaggcacctaccaccatgcccagctaatttttgtattttttagtaaagagggggtttcactatgttgggcaggctggtctcgaactcctgacctgaggtgatccgcccacctcggcctcccaaagtgctatgattacaggcatgagcagccgtgcccagccttaaccattttttgaataccctttatttatagttggggaatttacagttagagaaaagactgattagggataagtggcatagttgattttgctgtttccaatgtattatgttattaattaagaaccccaaaactacttttgcttctttgttgtaaaccgttcgttatggaagtttctggaacaaccaggtcctagttagagtgatgaaatcttaagacaagcaacacttaagggtattttggtttaacttcacacactcgaagtaagaggaatatattctcaagagcttacactaccaaaacattggggagaaatgcttcctcatcagaatatcttggtatacatgctaaatacaaaggttatggaatataatcttcatcacataatctaaaaattgttaatagacatggtaaggtactggtatttgcttttcataatagatgtgttctttagaattggggtataaatcgtttttatttttttttaatttttggaaatgtttctgagtcataaaatctttttcaaaatgaatctctaaagtccactaag

SEQ ID NO: 138742 - DNA, 1039 bp, Homo sapiens
ccccctctagttcaaccatatcactccttattgccatacaccagtcacttaacacgtttatgtaattttggtggtctccctgtatagatggattaattgatactttccttacgatgtcttagcctcctcgggaagatgaacaaaattagtatacattatgtacaacaatggtgaggcttaaattttcagttattttaaagcctagccttctaaatattcagagggtaagctgtagtctcaagactgcataatactaattctgggattttaaattcccttaacatttgttttagagcttagaaattacattgaaggttatactaaacaggttctgattagtgtgactaaaagtgtgaagtttttaccctctttttaatgtgtaccttgaataagatttgggttgtcttaatttatattcaagtagacataaataggttgcttcacttctcaagatattaagtgaactgttttaaaagacttgcgattaacttctttggtagctaggtaatcacttagttgaacttctgggcaagtgtatgcagaaagctcaagtcaaggaacttgtgagccaccaatataggtactcaacttgctttgaactgtgagtgtttgatgtagacctaaaagtactgtttaatatctgaatgccttaattgtatatttcttactgatagttctgatttttgggttttgcctccttcagctgagtctagagatgtgaaactttagaattattatagcaaaaatagttgctcatggttttggagcacttaactttgtggaactatgcatattcctctcatttaaacctcacaacaatgctatatggtgggtactatgattaatctcattttacaaatgaggaacttaaggtttagtcaaggagaacaccttccccaaagtctcacagctagtaagtaccaaagcaaggacttgggcccagacctgtctgactgcagagctcatgctcttagcagtgtgttttactgtttttgcttatggcttccctatgtcttgctttactacctttagataccat

SEQ ID NO: 138743 - DNA, 1014 bp, Homo sapiens
aaaagtgggaatgtgttagagttcaaaactttgagtttccttatgtattatgatctcaagtgtaaacacatttggatcaatgttgcaatctgactaaattatgggtaagagacactgctctaaaactgggcagatgtaatagcacatggagatcccagctacttcaaaaccatcactaaatatggtatctaaaggtagtaaagcaagacatagggaagccataagcaaaaacagtaaaacacactgctaagagcatgagctctgcagtcagacaggtctgggcccaagtccttgctttggtacttactagctgtgagactttggggaaggtgttctccttgactaaaccttaagttcctcatttgtaaaatgagattaatcatagtacccaccatatagcattgttgtgaggtttaaatgagaggaatatgcatagttccacaaagttaagtgctccaaaaccatgagcaactatttttgctataataattctaaagtttcacatctctagactcagctgaaggaggcaaaacccaaaaatcagaactatcagtaagaaatatacaattaaggcattcagatattaaacagtacttttaggtctacatcaaacactcacagttcaaagcaagttgagtacctatattggtggctcacaagttccttgacttgagctttctgcatacacttgcccagaagttcaactaagtgattacctagctaccaaagaagttaatcgcaagtcttttaaaacagttcacttaatatcttgagaagtgaagcaacctatttatgtctacttgaatataaattaagacaacccaaatcttattcaaggtacacattaaaaagagggtaaaaacttcacacttttagtcacactaatcagaacctgtttagtataaccttcaatgtaatttctaagctctaaaacaaatgttaagggaatttaaaatcccagaattagtattatgcagtcttgagactacagcttaccctctgaatatttagaag

SEQ ID NO: 138744 - DNA, 1062 bp, Homo sapiens
ttcaatagtagcataaacattagaaaaataaatttgctggaaacatgaatgcaatctaaaccaaatgtgattttaaaattatttctgccattaattccctccatatgtgtgaataattgagttgattttatagtgaagtaccttatgagccatacttaagggtttctgagagggactatgaagtttttcctggcttaaattcaattaagttttcattatagggtcactatgacatgaaaaggaaccagtatgaacacttttatacttattcccttctattttaaaaataacttgattatggatttgtattctggcattggtttttgaaccattgtgctttcattctttctagtctgtctaaaaatcactggagcgtttaagatggcagctgactaacataggcctttgaggtcttttggtcttctaaaggaagaaggccaaattttgggcccagtttcttaaggatgttttcaaaatgtacagtggctaaaatcttgtaagcagtaattttgtgtttatgatggctgtctccaagtttgggggaaaataatggcaaaacaaaaaatcacatttgagtagttcttagagcaattcctagagatgtatttcttacctggcctttcctctctaccctgtatctttgcattatttaatacttggaaaaacccacatagcattaaaaacaaagtactactgaacaaagtgataaatacattttcttaaatctttcttttctaaccacaggaacatttaaacttacaatagaattcactgaagaatatccaaataaaccacctacagttagatttgtctctaagatgttccatccaaatggcaagtatcacttttagtacagtgttttaaactactatagtgtttattatggagtattccacatttcctgtgtattttgtggtgcctgagtatttgtttaggcagcttgctgcttcttgaaagctgaacttgttcttggttgtctgtggctgtcttgtcctagaactgaagcagtggaggtattttccctttgcttggagtctgggagcctcctgattttgatgacct

SEQ ID NO: 138745 - DNA, 1034 bp, Homo sapiens
tcagaaccgttggagtccaacctatgatgtgtcttccattctaacatccatacaggtgaatttttccttaatgtgacgaactataacttttaatatgtttatattagcaattgaattgtttttgaaagtcataatgtaatagatctttttatttttggtcaaagcttgtttgttttatagatgaaaagtagaccattaagacccaagtcagctgggtacagtcgctcacacctgtaacctcagcactttggcaggccaaggtgggaggattgcttgagttcaggagtttgagaccagcctgggcaacatagtgagactcttctcccttaaaaaaaaaaaaagccgcatatattttcctagctactagcagattcacataactctgggtttgtatgctaaagacaagaaatgtagctgtacttaggacaattcaattgagtgtcactaccttataaaatagttgttttgcattaaggaactgacattttaaaaattgtctctttagtctctgttggatgaacccaatcccaatagtccagcaaacagccaggctgctcagctgtaccaggagaacaaacgggaatatgaaaagcgtgtttctgcaatagtagaacaaagctggcgtgattgttgaccccgggtacagtttaaagaagctggccataagaaaaatatatattgatgtgtttgtcacctccctactcctgtcattacatttactttattaaaagcaaaataactgttgtgctgtttccatcttccttgccaagttttcctaccccttctaccctctccttaaacatcagaaaacaccctctatgaaatcaaatgtactgtacctgggttacttgcaaaaattactaatgcttcagtttttctgttgtatttcatttccagttttcaggcagttatttttattattgtactttaagcttttaagatgaattgttatacaagaggtgcttatgcttagcttgatgaccaggatgttatttttaacaaaatgattgctgaagtgtttcatcctggctggt

SEQ ID NO: 138746 - DNA, 1282 bp, Homo sapiens
gttattatgcagtccttgaaatttatgtcatggaaccgccctctaaataaaatcttatactgtgatcacttgagcatctaagtcactaaatcctcttggatgggtccaggatggacgagctttctactgagcagtgttacagggaggaagctctagtgtctagtatagcttcatcagagttcttccatagctttaaatttggcatctcacataaatcattagtttccagctgttgtttgttctagaaagaaaatagagcaaacacccttttgtgatgaatgggtcagagctgaggttttgaagttgaaaactttctgaatcttttgataattctttttctttgatttttagtcacaactatgtaaagcaccatcacagagtcactcacctctgatacaaaagagaaaggctttgtaactgcctctgctcattatctgtcttgcattagagccatctgttccattttcaatccttaagtgagcttttcagcatgggtggtatgagattgtactggaacaatcttccagtccacttcaccttccagcacaagtgaagagtatacttcacctgtgctttagctcatttgatgcaaaagcagctaccagtcatgtgtggtggtgacctgtatacttgacttaatggtatattttctatcaagggtcttcccttacatgtggaaagacagggagcatccctccttatgctggaatcttacattgataattgagtctcttcacccaaatggcgtgaagtttttgtgatggaagtatctcgtaccaacaatgcagcttgcaaataatatggttggtactattttcctgcttggttcttttgaaatattcccattttaatgaattgtaaatttcactcattctataggtcaaaatcctcctaaaaagcaagccggttccaaattccatgcgagacctcgttttgagcctgtacattttgtagctagtagttcaaaagatgaaagacaggaagatccttatggccctcaaacaaaagaggtaaatgaacaaacacattttgccagcatgccaagagacatctaccaagattatactcaagactctttcagtatacaagatgggaattctcagtattgtgattcatcaggattcattctcacaaaagaccagcctgtaacagccaacatgtattttgacagtgggaaccctgccccaagcaccacatcacagcaggcaaactctcagtcaactcctgagccttcaccatcacagacatttcccgagtctgtggtagccgagaagcagtattt

SEQ ID NO: 138747 - DNA, 1067 bp, Homo sapiens
ctctatgttggtcaggctggtctcgaattcccgacctcaggtgatctgcctgccttggcctcccaaagtgttgggattacaggcgtgagccacacgcgcccggcttttgtttttatctcatactttggaaatatgtactcccaaatttgaatggaagtgatatgtagaatgtattgtgtttattttattttattttattattatttttgagacagagtctcgctcttgtcgtccaggctggagtgcagtggtgcaatctcagctcactgcaacctccgcctcccgggttcaagcaattctcctgcctcagcctcctgagtagctgggattacaggcgcctgctaccacacccagctaatttttgtatttttagtagagacggggttttaccatgttgggtaagctggtcttgaactcctgacctcaggtgatctgcccacctcagcctcccaaaatgttgggattacaggtgtgagccaccccgcccagccatattgtgttttagactgtgctttctgatgttcagataagagtcaatgaaaataaaattactcttggtatttaaatactcgtgctagctttagcagcaacagttgtcagtgggaagtacaggttacaacagagctagcttccagcagtctgtcggggaggccaccgtgccttgacttctgctttgcgtggaatgatacgtgatgggtgtgcaacctgttctactgaaaatggaaaatgttaccctccttctggttcagaactgattcatgtaaaggtatgatagttactcattttcagaacttcttcccaaatgctaccaggaatctcttttttggtcctaggctggggaaggctctgaaggtaggaagggagagcaggtaaccgtcataaccaacacttcacttgagctcctgtttctgtttctctgtagtaaaatgttattctatcaagcagccaatcttcataaggagccttttttttttttttttttaagagaccgtctcagccgggtgcagttgctcacacctgtaatcctagcactttgggaggctgaggcaggtggattacctgaggtc

SEQ ID NO: 138748 - DNA, 1096 bp, Homo sapiens
ttaatcattttctccctaattgtccaggcaaccagaaagctcaaatggctaaaattgtttcacttcattttttcatttgtctgtttcgtccaagtaaacaacttaaccaagaatttttttctgcaggcaatttctgagatatgtcttgtggctagtgaaaaattagttcagttttctgaccaactacatctacagcacttaaataattgtacatatgaatgcctagagaactgtgtgatttttacttaaaattgtagatagtgtctttatatttaataaagcagtttgattaactggggcatttagttttccagtcattgttgatcaataagattagaaggagaattctggcctactatttacctttgatgagacattaattaatagataaaatataccttaaaatgaaaccagctttgctcccttatttgtcttttcctggttgatacaagactggtgtttggaaggtagatagatgttggctgggctcatgttgcaaaactgtgcacatagtagggagagtgcataaatcactagctaatgaaatgggtgtgagagcttttgaaagattatcaataatctgggtgtatgttattaacttatatcaggagtcttatcaattgttgttgttgttgttttaatagagatggggtttccctctgtggctcaggctgatcttgaactcctgagctcaagtgatccactcgccttggcctcccaaagtgctgggattacaagggtgagccaccgcgcctggcccgagtccttttttctttttcttttttctttttttttttttgtgtgacaatgtttcgctcttgtttcccaggctggagtgcaatggcgcgatcttggctcaccgcaacctccgcctcccgggttcaagcgattctcctgcctcaacctccctagtagctgggattacaggtgtgcaaccaccatgcccgactaattttgtatttttagtggaggcagggtttctccatgttggtcaggctggtctcgaactcctgacctcagatgatccgcccgcctcggcctcccaaagtgctgagattacaggcatgagccactgctcccagctttttcttcttct

SEQ ID NO: 138749 - DNA, 1048 bp, Homo sapiens
tggatcatgagtgaaagcaagtaactgaacataagccacatcattatatctcaggatttaattccaagaacaacacccttgtacataaccagggcattaaaaacacaaagtaggccaatggtagttggtgttaaaggctcaagaattgcaggctgttgtgtgtgcacacaggtgcatctgtggatactatgtatgctacattgtacatactatgtatgtacaccatgttacattgtagctaagtcagtttagttaatacaagaattgccattacattatcaaatagcttaactgaaaagtaatgtttgcattatatctgatagcttccatatagaagaaagggaagggccaatgaagactcttggaagctagggaccaagtgcagtctttagatgggctttatgttacctctcatcttcaggtgggtaaaacttgtgttccaatacttgttgatgttaatgtagattttggcagagttcttgttttctgtggcagaatactcttctctcaagtgaattgtagaatacatggtgaaatagctctttctaaacttaaattgttaatttttttttttttttttttgagacagagtctgctctgtcacccaggcaggagtgcggtggcacgattttggctcactgcaacctccacctcctgggttcaagcaattctcatgtctcagcctcccgagtagctgggattgcaggcatgcaccaccacacccggctcatttttgtatttttggtagagacggggtttcgccattttggccaggctggtctcgtaccccggggctcaagtgatccgccagcctcagcttcccaaagtgctaggattacaggagtgagtcactgcacctggccttaaattgttgatttgttgctcgaggtttatcacttgacttttggaacaggctgtgaagaatagcacaaaggaatttccttgctcttttttccctctggcaaaatgttttgtattccattttacttggagctgaaataaacttctaggtcaaagaaatctttgaaaattccttcatcataagacc

SEQ ID NO: 138750 - DNA, 1083 bp, Homo sapiens
tgcgcataatgtgtctggactcaaacaaagaaatggatatatctactgtaaaaatggattgccctctttttaccctaaatgggatcagaaggattaacatttggctctgagtgaggttttaggtgtgtgtgtctgtggtgggggtgggggtgtgtgtgtgtttgtttttcccccctttcctagaacctggtgacgttttgaacaggcctctttgaaagctctttgcattcaatggagactgcagtatggttccaacgcagcgtgttttgtttgttttttttttttgaagaggctacttggacctctgtccttcagaacccctaaatcggccctatactagactattcattctttgatagattgggagacgacttcttttgacattcctgcaatcatagttttttgtttttgtttttgtttttgtttttttttaaatcaggaagggtgagagattctggaatatgatcatgtcaattttggccagttcagttccaggagtgactgtaacagatgcagaaaaataggattgtctcctcctgcccttaattattgaacatggcattcagtgtgatatactttgctctcatcacagacattacttttctgtcttctcaaggttagcataatttctacctccagagataatgattaggaggaactggttacaactgaagaagccttagttattgaacaagtcagataaatctacttgacctttgcctaacagtgttgttcttgagttcaaaagttacctttatcctataatcgtaagtctccataatatcacagaaggctgtcggaaatctgaatccttaaaataaaaacaaaaacttaaatgaggataactatcctttgtgttaataataaatcttaccttcccactagaatggaagctcccttaaggatagggattttgctttcttgtttacacctttatcctcagtgcctagaagattgcctgctaaataatagctgctcaataaatgtgtgtggagtgagtggatgtatacagctttatgatgtacaacacattttaaatatttattatttcatttcctacaacaactttggggattaggtggc

SEQ ID NO: 138751 - DNA, 1055 bp, Homo sapiens
ttgcactccagcctgggtgacagagcaagactccatctcaaaagaaataaaaatacacacacacacacacacacacacacacacacacacacacacacacaccagctctgggcccagctgtgactctttgcagccacaggcaagtctgttgacttctctgtgtttcttggtctactcatatgaaatggggatcagttctacttgctgtatttatgtcacaggaatgaaatttacatggaagagaggtcaaagtattatttaagcacaaaccaatgatgggtttccatagttcacattttcaggtaactgtggtctggaccctagaacagagttctgcaatcatccccatatgctctgcaaacaggtcttgccccagagtaccagttagctgactaggacagctctaaggatctcctggggtgaaacctcagcctcctctactttcccaatgggacaggaaatgcagtggctagagcctggggctctatccagtggcctgaggccacttagagatttgtggaaggtattcctgtacaaggtattgggtggtggtgctgggggtgggtggtggtgctgggggtgggtggtgggggacactagtcaggacctagtcattaagaagagataggccgggctcagtgcctcacgccagtaatcccagcactttgggaggctgaggcgggtggatcacttgaggtcaggagttcgagaccagcctggccaacatgatgaaacccccgtcgctactaaaaatacaaaaattagccgagcgtggtggcaggcgcctgtaatcccagatactcaggaggctgaggcaggagaatcgcttgaaattggaagatggaggttgcagtgagccaagatcacggccactgcactccagcctgggcaaaagaccaaaactccatctcaacaacaacaacaaaaaagagccgggtgcagtggctcacgcctgtaatcccagcactttgggaggccaaggcgggcagatcatgaggtcaggagatcgagaccatcctggctaacacggtgaaaccccgtctctactaaaaata

SEQ ID NO: 138752 - DNA, 1057 bp, Homo sapiens
aggcctgagcccggccagcactcagtaaatgttatattattataattgatgttattattgaccatgtgtggtaactatggggactctttttaacaaaatgtctgactaaacacaatgcagtattcctttaccatattcaggagcagagacttggagataaaatggcaggaagagagaacgatccagagcatggtgcctttggtgccatcatagcaatccctgacagaaatgccccctgaggttccagggtcctgcagggtcacagccctactggtccccacccacctgggcttggccaggctggggactgctcacaggggattctctccaatctccctgtgcttccctgccagctgcacgagaagtttgaccgtctgaagaaactgcaccaggacgagaagaagaaactggaggataagaagaaatccctggatgatgaagtgaatgctttcaagcaaagaaagacggcggctgagctgctccagtcccagggctcccaggctggaggctcacagactctgaagagagacaaagagaagaaaaagtaagtagcaggctgctctggggtggtgccttctctttcctcctgctcatcctcccagggcaggacgtggcacctgaaggggctgaggactggtgaccagaggtgagctgtgggctgtcagactggttgaggtacctataactggtcccagcatccctgtggcacctttggattccctgagcttggggagttgagagtagcagaggggtgtggtcccagaggcccagcccatctgtccagcttgctcaggaaagccctgcaaactcaaggtccataggaaaggaagggaaaagaggaaaagcaaaggagagtgagagagcagaagggaagaaaaaaattagaggtgcagcaatataagagaggaacaaggccgggcacggtggctcacacctataatcccagcactttgggaagccaaggcaggaggaacacttgaggtcaggagtccaagaccagcctggcctatatggcgaaaccccgtctctgcttaaaaaaaaaagaaaaaaaaaatag

SEQ ID NO: 138753 - DNA, 1050 bp, Homo sapiens
gtggatggtggtatcatgaatggcaacagggaatgttggagacacatgcttaagagggcagaagatgaatttgtacagagcttgattttcggggaggtcctctatgggatgtctgagtggacatccaggatgcagttggattaatgggtttagacctcagaagtaagactagcttgggaaccatctacttctaggtggtaattagggctgtgagagtagaaagaaccagctgcaaagagaacagaaagtgaaaggagcagaggctctaggaaagaatcccggggggtatatcaacatttaaaggagtaaggtgaagaaaacgagcctgcaaaggaggctgagaagaaatagtaggagagataggaatagaatcagccaggccagtgctagaaaagccaaaggcagagagcatttcaaggaggcagtggggaatggcataaagtgctgcgttgatatcaaataagatggaaaccaaaggccacattgaacttggccacaagtctgcgattcctggccttggagagaggcatttgagtggttatgctggggacagaagccagactgcagtggattgaggaatgaatgagagatggggaagaggaaccagtaaacatagaacaactctttctcctcatcctgtcaaggacttcttgacaggacagaggctggtaagaaagagcagggttaagggagagtttcttcagcacaagaatgcttacatgcagcatgggaaggagctggcagagaaggagtgaagaaggcgaagacacaggaaacagaggtattcaggatggagtgaaggaggagggaaggagacaaaatgaccaggtggaggcacacctactcctctacaaatgcagatgaaagctgcaggtggggaagacagccagggagctcccaccagaaaaagacaagcatggcttcccccagccccacctgtcagtatatagggcatgagcctgtccctcctgaagcaaatatccccaagggactggttaggctctgactccaggccagctttaggctgtgcacaggtagagtaagatctca

SEQ ID NO: 138754 - DNA, 1051 bp, Homo sapiens
caccccacacacccactggcaatagctggattttccataggtaggacaagactggttatcagagctgtgctaagttctggtcttctctgctgttcggagctggggatgctccactaggaacgtttgcaaatggtttctggacccacagtgtcccaccctgggaatggacttgtggtctgagaaacaggaacctgaagtgagacgaggagaagccagtagacatggttccaatgacttatttcatctgatgtggactactctgaacctaaacagaaaagggggttttgaaagtttttcttgtaagtctaagttgactgttccgcttgaatgaggaagaagttgtatattgctcaggcagcctgcagggccctcggaggcactccttctgactcaccattagagatcactgtccagagatggaggaggagatggcatatagcatagtcctgagaagttgtcttactgatgtcatctttaatattagcctgtgttctatgacagcagggggctttattcctaattcagtgggtcttaagcagagggattatgtgagctgattcgggctttggaaagattaatgaccacaaggtagtctgcttcaactatggctgacccacttatcccagacccttctctgccctcactaccctcttccagaccctgcaagacagaatctggggtgattgcctgttcacttcagacaccatttttcctacttgttcagggcaaataccaccatccgacacagtgaagccatacctgtagccaccttgacaaagtgctcctcgtgacctggtccagccagaaatcgattttgctatgacttggtccacatctgtcattcttgaccactgccccaaattgcagacctttgcttgcactcttttgaggaggggacttgttcacacaggccagaaagtggggtccccttgctcctagtcaccactgctactgtcaggccattatctaccttctaaagaaaccacctccttggaagcttctaccatccaggtgggccatgcctgcggtccacacccctccttgtcactgt

SEQ ID NO: 138755 - DNA, 1070 bp, Homo sapiens
caccctcatggacaccctgttcaacaccaaattcgaaggggagccagccacccacacacagccgggtgtccagctccagtctaatacctatgacctccaagagagcaacgtgaggctaaagctcacgatcgttagcacagttggctttggggaccagatcaacaaagaggacaggtaaagaaggcggtggggtggggtagggtggggaggttggtagagggccgcagagaggagctcaccacagagatcttgaagacagcacagatatcgggcccaagcctgtcctcccagaatggtgtgggcagcagcaggtacctcccaagcataggccctgtctggtgtccctgtctacagcaactgttccactccactcactttgccaaaagaagggtgtctttctagtatacatgggtcaggtctcaattccatgcagcaaacatttattgagctcctaccttgcgccaggtactgtcgagctctgaccatctaaaaaggaatggcttagtctctgcccttgagggactcataggcaaaaccggttttaagcaaataatttccatagagtataagatgttctgtaaaggacagggtacaaagagataaaggacaagttacaatgagaacacaaaggcgagaaccatcaattccacgtagggaggtcagggaagccttcacaaaggatgtgcctcctgagctgactcttgaaggacgaactgttttgccagacagacaagggaatggagagaggggcatctcaggcagaagtaactgcctgtataaaggcaaagtgatgtgtaggattctggtatgttctagggaagtgtagcttgctctctttggctagacagaggcagagtcactgtgaagctaatgaagattgcacaggccccttccaaagctctgtaactaatgttcaatcacaatgtcgtattattttcctcagagagtctttcagattgcataagcctaagggctggaaaaacctggttctgcccctgggctaacacttggagtaagcttggggaaaaaacggtgagatgaggctgaagaggtaagcaggtgccagatca

SEQ ID NO: 138756 - DNA, 1031 bp, Homo sapiens
gctggacatgtggggtttgacagcttgcctgaccagctggtgaataagtccgtcagccagggcttctgcttcaacatcctgtgcgtgggtgagtatttccatagcaggaaattctattacagaatatggatccttaatggctggatacggctttgcaggtaattaggttaaatagtgtgtcattctgatttagttgcgagagtgtctctcccctcttcttttatctctctgcctgttttttgtaaacagctggctgtaattacttttttcccctggccagatcagagtatagggccatatcttggggggaaactgagctatgtgagacccagtggaaattctgtaagggagctggctggctcagtatggctgtagagttcattttgactacagaagacaggatccagggcagaattgggagggaggggatagctgacaaaaaacgcctgcccaccagctgtgggcagtgggttgggtctgtttcctctgtagttttgctgtgcttggtttagtttgagctcgggtgcaggcaccacacagctgtatgcaacattcttttattccctttacctatctctctgcctagacttttttttttttgagatgggggtctcactatgttgcccaggctggtcttgaactcctgagctcaagcaatccacccatcttggcctcccaaagtgctaggattacaggtgtgagccactgtgcccggcctctacctagacatttaatctcaacagtgggagctgcatcttagccccctctatttgctaatcacagcacaagtagagtgcggtaatatctgtgaaatgaatgaatgggtgaatgccacaggaaccattcattatacttttcactttctcacattagctcttttggacattaccaggactctgcgaagtgagcagagcaagtagcatttgtatcctcatgaaacaggtggagacacagagtcttggggaggataagggacttacctgaggcaacacagaagaagtggcaccataatgaggactcaggcctggttg

SEQ ID NO: 138757 - DNA, 1746 bp, Homo sapiens
atcatgtatcactgaaccgatgattcatagtcttggagatttgcacggtctttcagacatcagtgttcagggctgagagtggaaatggagaaaagggaggtgtgagagcttgggcccaccagtaggtgactgaagagagtccggtttcagtgtttcttttctttcctagcatttttgttgttgttgtttgtttgtttgttttgagacagagtctccctctgttgcccagactggagtgcagttgtgcgatctcagctcattgcaacctccgcctcctgcgttcaagcgattctcctgcctcagcctcccaactggctgggactacaggcatgagccaccaagcctggctaatttttgtattttcagtagagacgggttttcccagtgttggccaggctggtttcgaattcctggccccaagtaatctgcccgccttggcctcccaaagtgctgggattacaggcatgagccaccgtacctggccgctttcctagtatttggatgggaatggccagaggagaaagtttagggacagcctagtcatcagcaatgagtttcaaactttttgcttttattctttagaatgacagctactaatttagccaccctggtttgaaacagaggcgggaaattctccattgacacagatgcaccctcagttcccagaggcctcaaatacggcttgcttactatcacagaggttggaagaggggccaaggggagtgggggacagaggtggcctactcgggtgcttaagggactctttattttcagtaacagcaatgagagaaagatgcgcagctggaaccaccataacttgttcttgataatatgaaccttacgaatattcaattaaaaaacgaaattggtgtgtcctcaggagaggaggcagaagagaaagagagcagtgtttctgcctgtgatatgaaatgtggtataacgtatttaaaaaccacaggtgactgcagatgaggagaaaacaggaaatgtaattggggaggggagtggggcgctctcccagttctcaggagcactctttcattttgccttccttttagctcctctcagactctctgcatcctaattacccctgctgcaaagctgagtgagaactcttctttcttatattaaaaatgttttaaaattacatgggtaacatgcgaatacattcgtgctataaaagagtcaaacaatagggaagcataccgactactcccttgactgagcccctatttccatccccctcccctgaggtagctacgattgtgggtttggtggctgtattttcagtcttctttctatgcatccacatacatttacgtgcaaatacacatctacagggcttctggggcatatatgggctcatattgtgcttatagtttacaacttctattttcttttttttttctttcttttttttgagacagggtctcactgttgcccaggctggagtgcagtggcacaatcttggcccactacatcctcgacctaccgggctcaagcaatcctcccacatcagcctcctgggtagctgggactacaggtgtgtgctaacacacttggctaatttttgtattttttgtagagacgggattctgctgtgttgcccaggttggtctcaaactcctgggctcaagcgagccacctgcctcgacctcccaaaatgctgggattacagtcatgtaataacttccattttcttctattttattacagtcgccctataacttctgttttctgttttat

SEQ ID NO: 138758 - DNA, 1035 bp, Homo sapiens
atctaattatctttgtgataagtgctacacaggagagtgactgcctgccatgagatttcattactaagggaacctaactcagcaatgaatggaggcagagggtgacaggaagggcttcctgagggcttcaaataggaaatgggtaggtgtgaaggtgggtgagatctcacatctgctactgggttgggaacatttcatttgccaattcacccacttttattttcattcattccttcagcacatattcactgggcactgatcggccaggccccgtgccaggtgctgaggatatagtggtggccaaggcacgcaggaactctgccctctcacagcttccagatgaaaggcaggaataagccctgtttcctttttacatcctaaatcctggaaatgtgagtgttagcggtgttcttaatacaaaactacattatagcagagtgatttgtctgtatcatctaatgagattttgatctgcagtcatgtgcatagcatttactttgtggagtctctgctgtaaattttctattaattgctggctttgttaccaagcatggccactgcctttgtgtgctataagggagcaaacctattgcattagcctgagcaaagccaattaggaagataagtcctctggaaaaaggtattcccaaactaagtagggctgatttctggacttgcctgggtttttggatgatcagagccatggtttaatattagcatgaacaattgagaagggcttttagttgcatgtacattaaaactacattcaagacagatgaggccaggtgcggtggctcacgtctgtaatcccagcactttgggaggccgaggcgggcagatcatgaggttaggagatccagaccattctggctaacacggtgaaaccccatctctactaaaaattaaaaaattagccgggcgtggtggcgggtgcctgtagtcccagctactctggaggctgaaacaggagaatggcgtgaacccgggaggcggagcttgcagtgagccgagattgtgccactgcactccatcctg

SEQ ID NO: 138759 - DNA, 1719 bp, Homo sapiens
ggaggattgcttgaggccaggaatttgagaccagcctgggcaacatagggagaccacccccgtccatctctaccaaaaatataaattagctggacttggtggcacgtgcttgtagtcctaactatttagcaggctgaagtgggaggatcacttgagcccaggaattcacaggctgcagtgagctgtgatccggccgctgcattgtagcctgggcaacagtgtgaccctgtctcaaaaaaagaaaaatgtatgtaaaactcaacgcctagttcaataaataacctgctattaaactctgtggtctcctagaattgggaaggtattttgtacgtaagattatatacccttgacccagataattgacccaatggaatgattttcattgttttagctatcttccagcgttaaaaatgtttttgaaagcaggttgcaattacagtgcttcattttgtggaagtactgccattatcctgctgaaagaaaagccgtgttaatcatttttgattttgcctttatgagggtaaaatcatgacagattgacatggacaattctgggattgctgtttccctgcactagacgtgaatggaggagttgatcgattgtaaagatcatgcgaggccaggtgcagtggctcatgcctgtaatctcaactctttgggaggacgaggcgggtggatctcgaagtccagccagttcgagaccagcctggccaacatggtgaaaccctgcctctactaaaaatacaaaaatacaaaaattagctgggtggtgttgggggggcgggcgactctgtctcaaaaaaaatatcatgcgggagcttttatatgtttgtgacccattatgagggggttcagagtatgtctgtgtacctccaggtccattgaatcaaaagtgggtacaagtacacttggagagagtgggcttcgccactactctgatcctagttaagagcctagccttcaaattattttgagaggataaaacttgacttggctagtttttaaacacatagggaattattttttttactctccagaaagaactccaaacttgttagaggagagaaaagcagtaccctttgtattttgtggtacctaaaaggttatgtgaatgggaacagctacattgctgtcagactgcctttgtaacttgacatttttttctgtgtaggtacaactccaaaaggagacattggagaagaaccaagctgggtctataaggaattgcacatgagatggcacacatatttatgctgtctgaaggtcacgatcatgttaccatatcaagctgaaaatgtcaccactatctggagatttcgacgtgttttcctctctgaatctgttatgaacacgttggttggctggattcagtaataaatatgtaaggcctttctttttaattgctgttgtattgtggtttgtcaattactgaattctcccttccctgccaaacctaataacaacactatccagtagaactttctgcaatgatagaaatgttctctggctaccatgtgcttgaagtgtgtttagtgtaaaggactgattctgtaaattttattttatttttttttaatgtatttatttattttgagacagagtctggctctgttgcccaggctggagtgcagtggtgcgatcttagctcactgcaacctccacctcccgggttcaagcaattctcttgcctcagcctcctgagtagctgggattacaggc

SEQ ID NO: 138760 - DNA, 2394 bp, Homo sapiens
ttcttccgccagcttccctcctcttcctttctccgccatcgtggtgtgttcttgactccgctgctcgccatggtaagtccatcggcccccatcggccccggggtggcttcccaaaacccgaggccgctgccaggaaatgcctgggccgcgcggagcgttgaggggcgggagccttttaaaggctttttcaagaaaatatccagttcggccactgttgtctttcgtggcctggagggaagctagtgagccagcgagcaacctggagagggacgggctgcgctgcggccgcggattcaagggggctctttctttgcccggccgctgccgagtcgggcagggattccggtttcccttcgcttgtagcgaactcgttctggaggcggggggtgggaggtggcagccacccccgaaatcgtggcctgactgtgggctgcccgtggcatgcgcaacgtggagggtaatcaggagggtattgtgggctactggttttcgaaaagggtttagcttggcgtggagaagcgaaccgcatttttagatcccaggacttttgtttagaggacgtttattcagagacttgagcgtcaccccgtggaagcgcctagaacaaggggtgttttgcgaacctgtgtgtcattctggccttcttagtaaatggcagcagcgaaccagtcactctttactgggaaatgtaaaatgttgatttctagatatggaggcgataagtactggtattttattacttgtcaagtaatttattacttgacaaaatttacaactgctactgtggatgggggacggggtgtaatctttgccttctttgtattggctcccattattatgcaagggtatgttcgtccaggttggccaggcattaaacctgcatccgtgccaattttgcaagattattctgtagatttgggggagtattggggttggccttagatgaaagccaaaagatgcaactagaaattgagacagtcatccttggaaaagtgacatttcatttatttttaaatttaaaagtttatttttttagccagtgaaatttagcagtagagatagagttaggattaataccgaaatggtgagtaggttagatcttctgaatgtcagggactttccctaagtcttaattaccctcccaataacacttgaaaagtacgtacccctgttttacaaagtagagcactgagattcgttgacttgcaaatggtaggtaggtggttctgtttgactcaaagctgtgttcttcccaggaagccagattccctagccattcccagtgtggtcgtctgagtccttgggggaccacagggtaaattgaaaggtagcctctggctgtggagcagaaaggacctgggtttgaatcctggttctgcacattgatgctctgattttgtgcatgtttcttaaccggattccacttattttatctgaacgatggaaactgtggtatctgcccccagagaagttgtgagggtcagagacttgcttggcttgatggcttagcattgagaagattttggggctggggtatgtgttaagcactcaaatgttggtttgaaggagttcttgactttgaatcattcgggcaggctctaatattgtctaaattgattgcattttcttcccagtcttctcacaagactttcaggattaagcgattcctggccaagaaacaaaagcaaaatcgtcccattccccagtggattcggatgaaaactggaaataaaatcaggtaagacctccatcatactgcttgtattttgctaaatgtaagagccactgtgtctggccagggttactttttgagtataaatacatgattaaaattgcatgcaatccaatccaccctttgacagcattctcaaattcgtttttaaaaacgtacttcctttgtttctgcactgcatccagcccacatctgggcttatgggcagataattctccaatacttattaatttcctggtcatcttcagtctgagctaggtcataaggtggaaggctgtcttatacacatcctggtggggaagacccagtcagtatttttaggctttttgtttttgtttttgtttttgtttttgttttgagacggagtctcgctctgttacccgggctggagtgcagtggcacaatctcggctcactgcaacctctgcctcccaggttcaagtgattcttttgcctccgccttcagagtagctgggactacaggcgtgcgtcaccacgcccagctaagttttatatttttagtagagatggtatttcactatattggccaggctggtctcaaactcctgagctcaagtgatctgcccctctcggcttcccaaagtgctgggattacaggcataagccattgtgcccggcctttgtttttgttttttgagacag

SEQ ID NO: 138761 - DNA, 2560 bp, Homo sapiens
ccatgttggccaggctggtctcgaactcctgacctcaggtgatcctcccgcctcagcctcccaaagtgctgggattacaggcatgagccaccgtgcccagcctaatgtcttttttttaataggacctaaacaaattccacaaattatgcttccttgaaatgtcttcttcagttctcttttgtttttagtttattttttgagacagagtcttgctatgtcacccaggctggagtgccgtggtacaatctcagctcactgtagcctcgacctcctgggcttaagccatccccctacctcagcctccagagtagctgggactacaggcatgcatcaccatgcccagctaatttttaagtttttttgtagagatgaggtctccctatgttgctcaggctggtctcaaacttttgagctcagccgatcccctcaaagtattgggaataaaggtatgagccactgcacccagccaagttttcttttaatctaaacaatttccccttctcttgttttcctaccatttgttgcagaaaccaatttgtcttgtagggcttttcctgttctgaattggcagattacatccccatgctgttatttaacgtgttcctctgtcttctgtgcttcctttaaaactggcacttagggcctggcatgatggctcatgcctgtaatcccaacaatttgggaggccaagtcaggaggatcacttaagcccaagagttggaaagcagcctgggcaacatagggagagcttgtttgtactaacaatgtaaaaacagcccagtgtggtagtgcgtgcctataatcccagttactaggtacctgaggtgggaggatcgtttgagtctggaatgtcgaggctgcaataagccttgatcatcccacttgctcttcagcctgggtgacagggtgaggccctatctccaaaaaaaaatttacccaagcatataaaatagtaattaccaaatggttgcttttctttggagatggagagaggaagtaggcaagttgtcatttaccgtgccctcacatttttggtcttaaatgacttcacttgagcatatattcatacataactatgactcttaaaaatcccatataaaagcttagtagcattgttgtaatggtaacatattttattgtacttcaggatcgtccagcgatgcagctttaccaaccaggagctcgaagccgaaatcgactctgtccccctgatgacagcaccaagtctggagattcagcagcagaaaggaagcaggaaagtggtattagccatagaaaagaaggaggagaggagtgataagtccagatggccttaggtgtcctgactgtctaggcagccaaagagcacacgttaagcaatccagaggtgccttcagggcaaagaatagagagaaagggagccgctgtgctggtggggtacactgcagaggagtaagtcttgtgtcaaagcaggaatctgatcagaggttcagaattggaagtacaatttcattgcttttgcaatttctacaaattaattttaaagtgtcagaaaaaggtgacggcaaggacatgcattgcaatttgcagggggaattgtcaagtgaggacttcatcacatatgacacgagagaaaagtaagagctggttctaaaatcaaaagctgttgttcatcctgaattgaattttctgaatttgggtggagcagagtcgctttgaagccttgttccgatctaattctattgtattgttgatgataagtgttgacattgggtagtgtagaagcaacaagcatgtccttgtagtacaggtacagtgaaggatagaacacactttcgttgatacaaaaatttaaatagttatgttacttctgtatccagtgtcctaaagttttaggattagttttagttttttgtttgcttatatgagcttagcgtaaagaatatttttaaacttcgtgttttgtcatcagcatcttttctattaagaggtaaaatgtagtccttgtttgactcttgacaatccagtgtgtttgatcttaggtctcatgatctgagtgcataccctctccaggaaggaaactgcaccagtgtctattcctgttaaatagcaacttttagtctcagcttgtttcgttttgatgtcaataaatagtaacagcattcaagtgtgaagctaagtgtgtttattaactttactaaatagctatgagttttgagaaattaaatttttgacatctgacatcactcaccttctagtgaagcctaagggagctttaactcatggcagaaggtgaagtagaagcaggcatctcacccaaaactgtaaacaaaagtaagagctggttctaaataaaacaaataaaagtctattaatttaaacataaaataggctggatgcagtggctcacgcctgtaatcacagcattttgggaggccaaggtgggcggatcacttgaggtcaggagttcaagaccaccctggccaacatggtgaaaccccatctctactaaaaatacaaaattatctgggcgtggtggtgggcatctgtaatcccagctactcgggaggctgaggcacga

SEQ ID NO: 138762 - DNA, 1683 bp, Homo sapiens
cagcactgtgggaggccgaggcagaaggatggtgtgagcccagaagtttgagaacagcctgggtgacatgatgagaccttgtctctacaaaaaaattaaaaaattagccatatgtggtggtgtgcatctgttgtcctagctactcaagaggctgaggcaggaggaccacttaagcccaggaggtcaaggttgcggtgagccatgttcatgccactgcactccagcatgggcaacagagtagtgagaccctgcctcagaataaaagccaaaggagtcttgatcctattgccacaaagtgattaaaccacttcgttcaagtggataacactttaacattaatagcatccttttagtaaattactactcttatgcactagttgttcacctgaaagattaagtgtacctgcagagatagggggctttgtctagtctaaattttaaatatttggtatactgggtttttaatagaagatagtgtcccagccttcaaaataaaaataaacattttatctttaaagctgctcaagaagccagaaaaaggagatgaaaaagaattggacaaaagagaaaaagccaagaaattggacaaagagaatctcagtgatgaaagagccagtgggcaaagttgtacattgcccaagcgttctgatagcgaacttaaagatgaaaaaccaaagaggtcagtagtcaaggactctttgttatgtttgatttatacatgctagttttgctgctatgtcctggacatgtacctgaattaagataagctgttttatgcagggcagggggatgaggaggaacagtttcagaatattcttgtatcttaatctgggtgaatggttttggggttttgttccttcttaaaacactagtatttttcactctgctctaaaagtgcaacctcattgcaggggccaaatcagaatcacagtgttcctgcatttgtgattacaagatctttcagggttctgtctcagatttgtttttcatgcagacctgaagatgagagcggcagagactatagggagagggaacgggaatatgaacgagatcaggagcgcatacttcgagaaagagagaggctgaagcggcaagaagaagagcgccgtaggcagaaggagcgctatgagaaagagaagacttttaagagaaaagaagaagaaatgaaaaaagagaaagacacacttcgggataaaggaaagaaggctgaaagtacagaatcaataggcagctcagaaaaaactgaaaagaaagaagaagtggtcaagagagatcgaataagaaacaaggtgctgcttgtcattaaacttgtttatgagggtttttttcccttttcctgcaagtgtaaagaaagtgtaaagggcactgttattatagaatttttaaaggggaactttaatcatctgcaacttttttttttttttttttttgagacagagtctgactatgttgcccaggctggagtgcagtggcacaatctcggctcactgcaagctccgcctcctgggttcacgccattcttctgcttcagcctcccaagtagctgggactacaggcgcccaccaccacgcctgacttatttttttgtatttttagtagagacagggtttcaccgtgttagccaggatggtcttgatctcctgacctcgtgatccacctgcctcagcctcccaaagtgctggg

SEQ ID NO: 138763 - DNA, 2515 bp, Homo sapiens
tataaacattttaagagcattgggtttctagaggagaaatagctgctttttccaccattactctttaaggatttgccttcttggtctcactctctagcctgctccttcactctggttgttggaccaggagttcactctacaaacgtggaatgttcttaggttgtcccagagacactcatttgatattctgaaagcctctggagagatagtaaggcagcagtggaagaataatattagcaggttctggtcttcattgtctttcgttttctgggtggagtggggataacggtggtagaatgccactttgtagaaagtaggaaggaaagattattcagttggggcctaccatgacttcaggatttattagggttttggtgatgattattttatttgaaggcttgtgttgatgtttctttctagagaatgagagaagaaaagagagaagaaaggaggaggagagaaatagaaagaaaaagacaaagagaagaagagaggaggaaatggaaagaagaagagaaacgaaaaaggaaagatatagaaaagctaaagaagatagacagaattccagaaagggacaaattaaaggatgaaccaaagattaaggtataagaatgttgaaactgactgcatgttgctaaaaattgcacgtatctacttctttaaatatgcatgcgtcttgtgttggtgtaaatgaattttttgttttgtttttgttctcttttggggggaagtgatccaataaaaatctttcctgtaatagtattagtttttaaatttaagatcatttaaaaggataaagtagtatgttatttcttcagtgcagatctgtgctgtttttgtcattgaaaatgttggatttttagactattgtcctctaaattcatagtaaatgagggcttagggctggctggcatgatttatggttttttttcagctttttcttcataattgatacatgaagttacctcatctgtttgttttccactgtcttcaggtacacaggtttctgttacaagctgtgaatcagaaaaatgtaaggaccaagtacatgatacagagcatctagtatcatgtcacacacacaggtcttagctaataagtccttttggtggtggtggtggtagtgttacttgttgaaaaccccttcaggttgacttgagtcttcttaaaagctgagctattttattataaatttctactttaaaaggaagcccaggtgacttcctgatgctctgctgtgtgcccagaagcttcattgacctacagccagaggacaaccatgcctatatagttctttctcatcttcttatatgcttctcataactggctgccttgtgggaggactagggataaataccctgcaatatgtgcctttccctctcacatgactcccgtagtatcttcctgcatatatctgggaatctgtgagcagcagattcggattcatgcattgcatttgggaagaagaaaacctgcagaaagatcccaaccttgccacttcccttctaagggcatggcttgggcagcccttgtttcaacatatttcctggggaagtactagtacctagcacttcagataaagtcaaagaaaatctcacagagagggtggcagggtctccttattttatttcctgaaaactcagcagtttatgtagcaagggttccctaagtctctacggggctcattactgatgatgaggggcttgggggaggatggagtttctcatcttaattctttccagcaatctctctgtctgctatgccacaagtgacttgacttgctattcctaacaatcagcaaggcagaaggtagagccagccatgctagagacattcattaatgttcttattagagtaatgaacaccttggtttctaataaggatgttcattggagaaataagagcacttccaatgaaacctgcacatggtatcctcattttacactggtgccttctcagtgtccattttggactcaccatttgcagtggctgtctgtgtgccaaaatgctttgtgcttatgtcttgtggtgctttgccttttgcttagtaatttacatgatgccttcaccctgagatgaaccttgtgtgataccttcactctgagacttgaaattcttctattttgcctaagaatctctctgattatccgacacttggaggtattctcgagagattcatagcagcaatgtaaaaaacaatggcatttttgaacatgcgtaaatatggcattaaatacagagttcctactcagtagagatggaacttcactatttggttgtataaggcctttagatttttaaatcaaatgccaaataattcttgttattaatctctaatggcaagataattgtaccatcataagtatgttattctcaggctcaaggcaaaattattcctgcaatggatctctcctttggtgaccaaggtatttgtcattccaagtactacataaaaacagtcccaacagaaacgatctgcctatcacttaaaatttgtgggctgtttcccattaag

SEQ ID NO: 138764 - DNA, 1852 bp, Homo sapiens
taacaaatcaccataggtttattgattagaagatagtggaaaggccaggcgtggtggctcacgcctataatcccagtactttgggaggccaaggcgggcggatcatctgaggtcaggagtttgataccagcctgaccaacatggagaaaccctgtctctactaaaaatataaaattagccgggtatggtggtgcatgcctgtaatcccagctattcgggaggctgaggcaggagaatctcttgaacccaggaggcggaggttgcagtgagctgagatcacaccattgcactccagcctgggcaacaagagcgaaactccatctcaaaaaaaaaagaaaaagaaaatagtggaaaaaaatcaggtttcaaagtttaacaggtgcttcttgaggcctcaccatttttatgattatttatttgacttttggtttccattatatttataaagaagaaggtttgaactgtcatgggaaaatttccatacccaggtaactttgtataaagtagctgaagttgtcactcctattttctggtctttggatatacaattagctacacacatagtattaggttgaacaggaatagaagaactgaggccaggcgcggtggctcactcctataatcccagcactttgggaggccaaggcgggcagagttgctgaggtcaggagttcgagaccagcctggccaacatggtgacaccccatctctactaaaaacacaaaaattagctaggcatggtggcgggcacctgtaatcccagctgcttgggaagctgaggcagaagaatcacttgaacccgggaggcggaggttgcagtgagctgagaccgcaccattgcactccagcctggacaacaaaagcaaaactccgtctcaaaaaaaaagaaagaaagaaagaaatacaagaactgaaaaaccaaaataattgccatttaaggtacactggctccagattttgagacctctgtaatgttatgttagatagctgttacacaactctttatgttggataaggactaggaccatattttatatcagattgttactttagaatcatctagtttaatttccatcatttgttactattacaggtattttataaagaaaacacggtaaggactcaataacacatagctgtgatactggttttattacagatttagatctggaagacttgatcaagtgacacatagaaacaagcaatataatggcttagatgtgtcaccctttctgatgttagaggtctaggagagaactccaggaattcccatcacctcaagtgccacatctaggacttctctctaatttatctttttggaacacctaacttagtttagtaggacagtgacttttaaaagcaaactatgtaatacccctagtggttctgttataatgcatggcgtctcatttttcctgaccccatgttataccagattcctatagtgagtatcagtgataggagtcctgagagcaagtgaccaattaagctctaaatagtctaccttgtgggtatggtttggttttttttaatcttccacgaagtaaaaaattatcttctttgataaatcagtattgtagataatgtcttctttttttgtttaaagtctattatattttctgtttcctcaaatgattatttagatccagaatatagaaagtttttggaaagttatgccacagataatgagaaaatgacatctactccagagacactgctagaggaaatagaagcaaaaaatagagaattaataggtaagtgggcaaaaagaatcagggcaacagtcttttcatcacagtacctaagtctcctacctccatcagttgctagctgtgtgacttcagggaagtta

SEQ ID NO: 138765 - DNA, 1004 bp, Homo sapiens
accaaggagcagcttcaggaacatcttcaacctatgcctgagcatgattattttgagtttttttctaatgatacgaggtaaaaaaaaaaaaaaaaggaaaggggtaaatgaaaaaggtttctttcattctttttatcctactgtttttcatttgatttttgagcttgtctttaatatatgcatacttgtaattgggccagacacctgcgagtacatttacataattgctttcctctctgcagtttgtatcctcatatgtatgccagagcatacatcaactttaaaaaccaagaggacattattttgttcagggatcgctttgatggttatgtattccttgacaataaaggtgagtcctggtaactgaagtaaaaagggaatttctttgtcatttgtatgtttaagacaactcgtgcattgcgttgcttcctagagttttacacatttaataagcttattgcagtcttataaatagacgtgacttttcacagtccttggttatttttattaacctactatttttttagtttgatcaactgagtgaaattgcaactgttttctcctcgtgtgacacattttttgccctggcttaaacctgctgttttgactgtagaatttcagccgcagtactgataagtgactcttaaacttgtttgataagttttaaatatttacttcttattttgcttcgaggacaaacatttatttaattcaaatccattaagccaacagttcccaattgggatactgtttaacattctcacaaagttgtatataattaaaacatgaaacttgatacatctcggcctggtgtggtggctcacgcctgttatcccagcactttgggatgccgaggcaggtggatcacgaggtcaggagatcgagaccagcctggccaacgtggtgaaaccccatctctactaaaaatgctaaaaaaattagccaggcgtggcggtccacgcctgtaatcccagctacttgggaggctgaggcagaagaatcgc

SEQ ID NO: 138766 - DNA, 1023 bp, Homo sapiens
tgaacgcccaacaaaagcgggtagctgctttgtatgccgggatttgtagtccccgacagagtcacttcaagatggcggaattgctaatgacgcgcgaaggggcgggccccgagggagtctgggccgcgaggggattgggtggcgcaggaacttggcgggcgggaagtaaaaaccaggtgttaaaacctttgcactgggaaaggcccaagtctcgcgagagcttggcaggacccaatggaacgtggggcccgacttatcacaaggggcatttgttgggggcggagctttgacgggagcttcccgggagccgtttgtgcccggggtaaccccgttccggccaagccgcttcagcgggggacgtagccatgaaggaagagaaggagcacaggcctaaggagaagcgagtaaccctgttaacccccgccggggccacaggcagcggtggtgggacctcgggggacagctccaagggggaagataagcaggatcgcaacaaggagaagaaagaagcgctgagcaaggtgcccggtcggccgctggcccgggagagggcgggacgagtccgcagcgcggggaggatggctgggaatggggctgccccctttctttctcaggttctccttctatctcttcgcctgaatggaagtcgcatcatcctggttcatccattcacccgaaatggggagagcccctcccggccaaatcctgggtgggggtgaggaaaagaggggactccccaaacgggaagggtttaggtcagagctgtgagatgataatgggagggaagagcgacggtataaagaatgaggaactaaaggtgtaattggggagaaatattaaatagtgaaggagacatgagggatgggaatattattcatggaggcgagttgggggagagtgcagggtgattaatggtacaggagggtagatcgagagcatcctattttgagagcaatgggtagattttttgtattcgttagagttttgaattcttaagttcaatgggcaaggattttgttttaa

SEQ ID NO: 138767 - DNA, 1025 bp, Homo sapiens
acaaataaataaataaataaccaagacagcaaggaacatttcccatatgtgaagcctgtggtgctagctaccagttccccaaacacaacccctctccccaacaccttggctcgggtatattttgtagtacaggctcccaagagaaagaatgcatgaaagtactttgtaaactattaagtgatacagaaatgtgatataataaacaggctcagaggtcttgctttcatcatggctttggttacttcgagcaaattatagctcttttctcaaactactcccacccctataatttatgccaaagtgttctgaaaagaaacacaggcaaaatggttatcctagggctaaaaatcctgattatacctaccttgaagcttttaatccaggaccctacttcaccacccgcctgctctgtcactttctctacaaaggaaggacacgaagtaagacttccaaaagaacaaaacgtttattttttaaatttaagaattatgggaaacctaagtaatgggaattgcatcctcatcggggtcttctggcaagtcggaagcaccaccctctcctgtagctcgatgcttctctagtttagcaatcaattctttcgctggattgaagacgccattggtctgctggtcacagacatagcagcgcggggtggtgcggaaatgctgcagtgcacagctctcgcagaaataatgcctgcacttggtgacaactgggttttggaagctctggcgacagatgaaacacttgaatggtatttcctcatcatcgcttcccacttcatagttttcatcctcatagacaccatagcgaccctcatcaagctcacgttcgatctgccacccatgcttgtaatctgaacggtcatggaggaatttgcagctgtctccgaagccgcagaagccagtctctttgtagtccttacagatgtcgggctggtaatcccagcgcacggtggcacgtagatgctcgggcgctcggatggggcccttcctcaccatcccggaagaggcattgcccataga

SEQ ID NO: 138768 - DNA, 1026 bp, Homo sapiens
gtcacgggtcttctgtatcattggattgtgggtcacccgcttcttttccggtcgaaccacagtgcagccttcgtcgctactgctgccgctttctccgggctctgggtcgcaggccgggcgctttctgcgtccagcagcccctttccgcccaggctttttgaaaaggaaggtgcacacctgatccaccgcctttcctggagaaagctgctctgccattttagagtcctgagctccgaaacagccgtggctgcctgggttgcacttggcccctgcacgtcactccacgttgcgcgctccgccgggagtcgaagcaaaagacactgacggaagaggactgcgagagcccgagcgcccgtctctcttgtgccctagcagattccgtcgcttcttccggagccgtacgtggcaccgccccgctcgcgggcggccgcggggcttgctgggaagagaggcgaagccaggtcacctttcaaggacccagaagtagggttttggcctaggtaacggggcagagatgtggttcgagattctccccggactctccgtcatgggcgtgtgcttgttgattccaggactggctactgcgtacatccacaggttcactaacgggggcaaggtaagccggcttcggcccgggggccgactccacgggctgatttccgaaaagggtggtgggcagggagaccgtcagcctgcgaaccctctctccgaggtcggccctctacttgcttccggttgcctagaagccgaggcttgcgaaacgaagcccgatagaaactacatcctgctctagtgaaaaacagcgtttctgggtgtatcagagtgggccttagggcagagtagcgacgcgggggccgggaaggtagattagaaaaggtggctcaagcctgagaatcgctcactgcaacctccgccttctgggttcaagagattctcctggttgggcgcggtggatcacgcctgtaatcccagcactttgggagaccgaggcgagcggatcacctgaggtcgggagttcgataccag

SEQ ID NO: 138769 - DNA, 1069 bp, Homo sapiens
ccggccacccttgacttttttattccccactttctcttgcaagcctttaggaatttactgcgagatcttgtttttttacatcaggattcattttcccctcttcctagtccttcacatcatctcaagagtacaggatataaatttatttactttttgattttgttattgttcttcacgtgtgatctacagctgttgtttcttagtgtcccaaaagacaacaactagatatttctttttttttttttttaaaaaaaaaggaaaaaaaattcatgttggttaaaatagtgtaaaaagtcacaggtaccaacttaatcctaaagtttagtggtctgattttatttaggagattctgttctttgtactactaatttgcatttttatttaaacgatgattccatttctctggaatgtcccttttaaaaattgtagtatctatcaattgggtcactcacttttataaactgcaacaataattgtctcttatttgaaggaaaaaagggttgctcattttgggtatcactggagtctgatggaaagagataggcgcatctctggagttgatcgttactatgtgtcaaaggtaagatgccactctgatgccagccttttgccagggttgaggtgggttctggtaatgccttgccaagggtcatacagtgctaatatataactagcattttcttatctactagtgaggttggcatctttttacatatttaatcttttatatttcttttttttttttagtttttcttctgtcatatatttcttattctgtggattgttgcctatatcctttgcctgttccattgtctttttctttttgagctatggttctttatatattctagactttaatttttttgtctattttatatatgacatttttcccagtctgctgtttgtcttttttactttatgatgtttttcatcaggtagttctaaattttgatattcaatgtatcatgttttgttgttctggattctaggtttttatgtctcccgtacaaaggccttttctatctaagattataaaaatactttcaaaaaataaaatagagacagtctt

SEQ ID NO: 138770 - DNA, 1052 bp, Homo sapiens
gcttggccaacatggcgaaaccccttctctactaaaaatacaaaaatcagctgggcatggtggcacatgcctttaatcctagctacttgggaggctgaggaaggagaattgcttgaacctgggagatgcaggttgcagtgaggcaagatcgcatcactgcactccagcctgcatgacgggagtgagactccatctcaaaaaaaaaaaaaaaggatccaggtggtaaagagttgcttgactttagttctgattgggggtcggggaaggtttgtttcatataaagcaatatgctgctgtcagaaaatgaaaactagaaatcattacaggttattctttagtgattataaaatttaatccaatgtattgttgcagttagagaaatgtgggatgtggaagcactctttttaataacaatgccatttaatgacactggaaataaaagtacatggcatatctttgatgggaacagacttgtcacattctcctttttaaactgtttttcagggtttggagaacattgattaaggaagcattttcctgattgatgaaaaaaataactcagttatggccatctacccctgctagaaggttacagtgtattatgtagcatgcaatgtgttatgtagtgcttaataaaaataaaatgaaaaaaatgcatttcttttttttaaatatgttacacaaaatcaagcaatctacccaatgtagtctttatcacttaaaaaaaactagaaggcaactgtgaggcttgtatagacataatgtacatccataatgtacatcaagcacctgtctctgtgcctagcagctaatacttcataaattgtagttgctactattgtaatagacactagtatattttatttaactttatttatttatttttttagacagagtcttgctctgttgcccaggctggagttcagtggctcaatctcggctcattgcaacctccgactcccaagttcaagtgattctcctgcctcagcctcctgagtagctgggattacaggcacctgccactgcacctggctaatttttatatttttaat

SEQ ID NO: 138771 - DNA, 2814 bp, Homo sapiens
tacctgagtgataaggacattctgattatactattgtaaaatgcccgcttgccttatatttttaagtggttgtttttcaaaagtgtttaaataaggcagtcatatttcaaagtatagagcaaaagtttttttattattatttttgagacagggtctccctctgtcacccaggctagagttcagtggtgcaatctcggctcactgcaacctccacctcctgggctcaagcaatcctccacctcagcctcccgagcagctgggactaccagtgtgcaccaccatgcccagctaatttttgtatagttagtagagacaaggtttcaccttattgcccaggctggtctcaaactccagacctcaaacaatccgcccgcctcggcctcccaaagtgctaggattataggcgtgagccaccacacccggcccaaagttttataattaaacagtattaacagtcttaaatactattaaatatatgttccaggaaatgtctacttttaacccgcaactactgaaaataagagtcagcatgtagcagcattaatgacccctgaatttgaaatgatttctgtttatttatacctaattgtagttgctgcctagcctaataaatctgtagttttcaaaagttaaaagaaactagttcccaaagttttgagtctcaatccatctacttccctgaataataaaacctgaattttgtaatacccacttaaaaattttattctcagctgggcgtggtggctcacacctataatcccagcactttgggaggccgaggtgggcggaccatgaggtcaggagatcaagaccatcctggctaacatggtgaaaccccatctctactaaaaatacaaaaaatgtagccgggcatggtggcacgtgcctgtagtcccagctactcgggaggctgaggcaggagaattgcttgaacctgggaggtggaggttgcagtgagccgagatcaagccactgcactccggcctgggagacagaatgagactccgtctctaaataaacaaacaaataaaaatgtattctctaaggacattttttttttggttactggttcctagagatgaaatgattatcttattttcagtaggcaaggtagtttaaatgcagaaattctgcgatatatgaatattgtgacatcaagaacagcttcattggcatattctttgggaaagaggcaagaagaataaaagggctaaaagtattttattttcagcttatgagtgttgttactgcttcaaattgtgtttagtcacctgagccataaatcagttgtagtagggctattgtattttaaatatattttttgttctccaaggagacttatctagtttgccacctccttgcctattgctctgatgtggttttccctccttttttatttattgcacaaatatctaacagttaaaaaagaaaaatttcagtaccatatcaattgtctttcatattttgtgttcctcctttccagtgcttttctatgtaagtaaatattctgatgtacttgtaagtaatcactcagagcataatgtaattttgtctttggtgtcttaaaattttgcagccaggcaagagaggttcacagggaaggtaggaacaagtgattattcagtgtgaggatgggaagaagatcaaagataagtaagggcaatgattgtatccttcccgtgtcattgcccctagtccccaagccaccctcctgcaatcatgagtatagtggtgtattgtggaaggcagcatgcccagttttccagtttcaaaatatattatttagcagtgaggcttaactcccagtaaatgaaggggtctgtgagtaggggaacccttcagactggttatattatgagctgtagaactgttgccattttgttgttcccagttgtgcccataaagagatgtgtctgagctggagacttaggctcagatggggaacaaacagccaagtaccaaccttagtttggtccaataggtgaattttagcaactctctaaactcagctctatacctgtaagactcagaagtgatacatatagtgatagaaaaaaatactttagaaaatagaaaacaacttactggttactctgctaatgtgatggaggttgcagaatggaaaatgaatgaatgcaaaaaaatacagctggattgtgtgccacaagtttattactcaataaatattctgtggtttgacgtgctgtattgtatttttaatgtatcctgatgagaaaaacaatcctaagacatcctgtaagtatcagacacgattgaataagaaggggaatgactccatgaaactatatttggcatcagtaagattcttctgccagttttctcgaaagcgaaccattcctggtctacaaaggaagaaaaacaaacacttttaaagtatttttaaatcaaaagcttttaaaatcaaacaaaggggattccctatttactcttttatattcctagtaagcaagaagcctcttttattggcgggggaggggaggtagctaaggttctctatgtctatcctttactgtttcttaagcccagtcaatgaaaggatttatgagcttatatgtaaagatactttaagagagctgctataaaagggattattatacatgagttaattttatgtgatattgaagttttccttagaaacgatagacatgacccactttgcctccaccccactccagcaactaatcctcaagcttataatgaatgaaaaaccagacactaagaaaaataattttctagaacagtttcagcccattctaatgggcttggtggtccaaagaagaaaagtgaccatta

SEQ ID NO: 138772 - DNA, 1142 bp, Homo sapiens
acatatcagggccgggcacggtggctcacgcctgtaatctcagcactttgggaggctgagacaggcggattacttgaggtcaggagttcgagatcagcctagccaacatggtgaaaccccatctctactaaaaatgcaaaaattagccagacctgttatctcagctactcaggaggctgagatgggggaattgcttgagccagggaggtggaagttgcagtgagccgagatcgtgccactgcattccaacctaggcaacagagcaagactccatctcaaaacaaaacaaaaaaaaaggacgtgtcaggcagctaaaatattaataaatgatcttttggaaatttaacccatttcaatttttgtcagctgttaaatagaccactctgggtaagaaaggattaatgatgatgtactatgaaaataattactgagaaattaagccaaaaataaaattctctccaggcatcgccgaatggaggctgtgcgactgcgaaaagagaaccagatctacagtgctgatgagaagagagcccttgcatcctttaaccaagaagagagacgaaagagagagaacaagattctggccagttttcgagaaatggtttacagaaagaccaaagggaaggatgacaaataaagattttctgattgtccagaagacatttttaacaacaaaaaagaaagtctgggttccacacatacatagaaaaagattattatgttctgagaaagctttacagtgctactgtgccttctatttaattctttcagtccttcaataaaaagctgcttattgatataactttagcaagttctttgggttattttggattgaccatagtaactttctggtttaaaaatccaaattatgggctgggcacggttgctcacgcctgtaatcccagcactttgggaggctgaggcgggtggatcacttgaggccaggagttcgagaccagcctggccaacatggtgaaaccctgtccctactgaaaatacaaaatcagccaggagtggtggcgcacacctgtagtcccagctactcgagaggaagaggcaggagaattgcttgaacctaggaggtggaggttgcagtgagccgagattgtgccactgcactccagcctgggcgacaaagcaag

SEQ ID NO: 138773 - DNA, 1028 bp, Homo sapiens
cctttttatcacaaaaatatttaaatattcagaaaagcgaagagaatagtataattaataccatatacttaatcacctagatttggcagttgttggtatttttacatatttgcttcaaatatgggtttttcactgagatagtcaaagttaattacaaatatcatcacacttccaccctaaatatttctgtatgcatcccgtaaaaagaggcattttcctaattagccaccacactatctcacacaataaaattaataataataccctatatcatcaaaacctagtgactttaatttctatgttcatagtacctccctacagttcgtgacaaatagcaataaatgtttcaatgaggtaatttctttgtaacaataaatgggacagcaataggatagttacctactcaaaagtactacggttttagagttaaaaaatttttttcttaattgtaatgtgctttaatttgcagatgaagataacaaaaggagagcaaagaaagccaagaaaaaggaaaagaagaagaaacacagatcgtcagttttttaagttttattatggaaaatttcttttctttttttttttttttttttttttttgagacagagtctcactctgtcaggcaacagagtgcagtggttcgatgtcagctaactacaacctccgcctcccaggttcaagcgattctcatgtcccaacctcccgagtagctgggattataggcacccaccaccatgcctggctaatttttgtgtttttagtagagatggggcttcaccatgttggccaggctggtttcgaactcctgacctcaagtgatcctcccaccttggcctcccaaagtgctgggattacaggagtgagccactgcacccggccagaaaatttcaaatgcatataaaattacataaaatagtataatgatccttcctgcacctgtcatgcagtctaaataattatcaactcatgggcagtatctgccatccatcatttattttggacccaatctcagatatcattccatccataag

SEQ ID NO: 138774 - DNA, 1059 bp, Homo sapiens
ttgttttggtttttttgattcccaagttctgccttaggatctccaatgcttgcttttaatggttcttggacaatcgatgctgttactgaaaaatttggagttcatatctttacactccatggtccatatctcatcactttcctaattcttataaccattttatttaaattcagttctgatgaacatacaccagtggaggatgaagagccaaagaaaagcactacttcagcttctacttcagaaggtatttttaaaaaaagggtatttttaaaatacaagctattttattgagagatttaaaaaaatcagtttgtaaatagttgaacattagactttgcttttactcaaattgcccatcgtctgtttcttttgatgttcagaaatagttttttagaatataattttttaatttgtactttcttagaagaaaaaaagaagaagtctagccgttcaaaagaaaggtccaagaaaaggagaaagaaaaaatcatcgaaaagaaaacataagaagtattctgaagatagcgacagtgactctgattctgaaacagactccagtggtaagaacgccaacagcattctgcaagccttgcttcaaaactagttttacttcttaaaacttattttagaagaaggttcctgaaaacaataataatactgaagagtttttgaacacttgctaaccttgtgccaggtaccccaataagtgctttatatttattattgccatttaatccatacaataactgtagggtacatcttatagatgaggaaatggagacagagcaggttataagtactatccctaaggtcacacagtttggattcaaacctaagcaatctgactccggattgggattggttgtgcaaagtgtacaaggcacatggcaccagaccaagtcagggggttgggctgtaccaaagtaagccttacagggctgcatcggcccagtggaagggctcttttgtttaattctcatgcccaatgagcacctctacagttttcaaaaaggtatgccataaagtgcctacttcatgctggctgcctatttgtggaagg

SEQ ID NO: 138775 - DNA, 1179 bp, Homo sapiens
aggcgcgagtcattaacaaaatttgcgccctctaagctaacacggcaatatggggcttagacaccatagctaatccccagtcgcgaaaaaccctcccgatttgcttgggattggaaagaaaaagaaaatacacattcatactttcatacatgacatacacacacacacacacatttatatataaatacacacagaaagcacaggaaacacaagcagaattaactgtcttgttcatacggccactcagtgaaatgtatactgtatattgtgtttgaaatatatacttcccttcaagtgtttcaagttcaaggctgagaaagaacttggtctcttgcttagacttgaggagcctcactcggaactggaaggatgcacgcaatctagttgccccaccggcttatttatattgatgcacacatcgcttcctgtcggtgacgaccgcctagatccggggaagggttttgcagaagtacccagaactgtgtccaaggtttcctcagatttgggctgttccgcagcggcaggtcccgggaaccaaggcaacagacatcttcctaggctcgcgagagcgcccccttgtcccacggctgctggggccccccagtagccatggctccggtgtccggctcacgcagcccggatagggaggcctcgggctcggggggaagacgtcgcagttcgtcgaagagtccgaagcccagcaaatctgcccgctccccgcggggccgccgctctcgctcgcactcttgctctcggtccggggaccggaatggactcacccatcagctgggtggcctcagccaaggctcccgaaaccagtcctaccgctcacgctcgcggtcgcgttctagagagcggccctctgcgccccggggcatccccttcgcttctgcctcctcgtcagtctattacggcagctactcgcgcccctacgggagcgacaagccttggcctagcctcctcgacaaggagagggaggagagcctgcggcagaagtgagtgagacggccgcactttctcttgtacgagcctacgtgcctttggagtccgatctatcattcattccgcttctgactattcgcatttcgctcactctgcttgccttgcgcccattttcatccctttctttaatccacccacgacaaccctttattcgtccttttcattttcccttaccct

SEQ ID NO: 138776 - DNA, 1018 bp, Homo sapiens
ggccatggactcttctgtgatgttaccgttattgtggaagaccgaaaattccgggctcacaagaatattctttcagcttctagtacctacttccatcagctcttctctgttgctgggcaagttgttgaactgagctttataagagcagagatctttgcagaaattctcaattatatctatagttctaaaattgttcgtgttagatcagatttgcttgatgagttaattaaatcagggcagttattaggagtgaaatttatagcagagcttggtgtcccattgtcacaggttaaaagcatctcaggtacagcgcaggatggtaatactgagcctttacctcctgattctggtgacaagaaccttgtaatacagaaatcaaaagatgaagcccaagataatggggctactataatgcctattataacagagtctttttcattatctgccgaagattatgaaatgaaaaagatcattgttaccgattctgatgatgatgatgatgatgtcattttttgctccgagattctgcccacaaaggagactttgccgagtaataacacagtggcacaggtccaatctaacccaggccctgttgctatttcagatgttgcacctagtgctagcaataactcgccccctttaacaaatatcacacctactcagaaacttcctactcctgtgaatcaggcaactttgagccaaacacaaggaagtgaaaaattgttggtatcttcagctccaacacatctgactcccaatattattttgttaaatcagacaccactttctacaccaccaaatgtcagttcttcacttccaaatcatatgccctcttcaatcaatttacttgtgcagaatcagcagacaccaaacagtgctattttaacaggaaacaaggccaatgaagaggaggaggaggaaataatagatgatgatgatgacactattagctccagtcctgactcggccgtcagtaatacatctttggtcccacaggctgatacctcccaaaatacca

SEQ ID NO: 138777 - DNA, 1103 bp, Homo sapiens
cagctttccccttccatgttagcactttactgctgaattctcaattttcttaacattgagacaataaatgtgtgttttgtcttgtatatggcataaagagtaaataagttttagagttgttctggaaaatgtcagaataagtcagtacttgggttgtgtaatctgctagtccaagcgaacagcaacctcctgctaccctccctctatgaaaatagccatgcagacaagtctctcatctgaagaacaaattagatttagctaattagaattaatcctggctttcattgccatagtctgtaaaagactttggtggctagaccactttataccttcgcagtgtggtctctgggggcaaaaaactaatgaaaacaatctctgtaatggcagataggaggagatgaaaagttctgttgcatggatttttaattctctggctaccacatagtagagaatggaatgaagatttccttttggcttcttaaggttaaaaatattcccatgaacatgaaaattttcaaattttgaatctgaaagccaccaaatgtatctttatgtataaatccttgtaaatgatagattccatgggtgagactttacatattttgggtgggaggctactggcatatatttttaaatgttcatattgcgtagaatctccactaggaagtctttatttgaaatagttgaatcagtgatctagtattttcctttcggcaagatttgttaggtttttaccccttctaaaataagttttattccatctgcaaattgctgcaatattatagtaatcagaaactacataaggaatgttatataggcttgtcagttcccatttttcttgacaacaataaataccacttttaaaaatgacacatatttaaacacttagaaaataaagttaacacttactgaagtgctagtactaaactgtgctagtactaaaagaaaacaggttggaacatacatatagcctagcatttataacagaattgttgaacgtctgtaaatgattttttttttttttgcaaaggaaaaaattgatactggaaaagattgttgtgcatagttattagtcatttgtaaccttgcttaagtatttctta

SEQ ID NO: 138778 - DNA, 1011 bp, Homo sapiens
gtggatgatatcttggcaactgctgacatcgatgtattcgtagtacccaccagtgatctccacccggctggacagggaggagcatgctccagtcagtccccagggagcaggctgtcctccccagccccctccccaactctgggattgggctaccatacagctcagtgaaaagacaggtgggcaggtggggagctacagtaagagacatcatagccatgtactataataaatcaaagtgtgattgtttatccccactccccgaaaaaaaactcctacctgccagaaaaatacttgtaaccaccactaacactaatcctagatagcacttattgacacttgctatgtaccaggcacagtgctaagcatttcacatgtgtgaattcattgcatctgtgctgtttaatgtggtagctactagccacatgtggctatttaaatttaaattaagtaaaattaagtaaaaagaaaaattcagttggtaagtctcaccagccacatttcaagtgctcaatagtcacatgtggctagtgtttactatactggacagagcaggttacagaacatttccatcattgcagaaagttctgcaaatcctcacagtatcctatcaaatagggactatcaccatgcacattttacagatgaagaaagtgaagcacagagaagttaaagaacttgcccaagtcgtaagtggtagaactgggacctgaattcaggcttcaaagacttcagtgtgtgccctctcaaaacaaaacaaacaaaaaaacaaacaaataaaaaccaatgtcctggtaaacaactaaagctgagttgctacacaaaacctgaaagtcgcctccgtggggaggcctttcttgaccactctgtccaaagacaccccttcccagccctgtcgctctctatcacattatccgctatggaatgaattttgtccctccaaattcatgtgttaaagccctatcccccaatgtgactgtatttttagatagggcttttagaagataattaaag

SEQ ID NO: 138779 - DNA, 1069 bp, Homo sapiens
atggcagtcatcatcagttattattaacattattattagtgctgtaggaccgttgtgtgaattttccctctttgggctgtattaggactaggtttgtcccaggattaggcaacactgagtgaagtgaatgagtatgagattgctgatgagaaactcttttcaagccctccttggggctctctcaggcaacaatgtttggctctgctcacagaaatgacatgatgttggacctacagatttgaactgaattatgaaccagaaactggaacaaaccacttaactttgctgtaccccaaactgaatccaaatgttaatttttaaattgaaccatgaaccaaataaaattaaccaaaaaaggtgttgtggaagggagaaaaaaaacccatagtaatccgactggaaatggaactgaccctttttattttattagatgaactaaagcagaactggaacatgaacacattgattcagttggagtccctggagaataaacgacagcacctgtgtgcctgtgatacttggctgttgcccactggctatctaatggcatttgccctgtgtttctgcctccattcctttaccccatccctgtcctaggaatggatcaacagctagagccatccatggagatcaaaagactcagtttcatggatgaagggaaagcaatggaacataggtacattcctttggagatatcttccttttttcccaggatgtgtgaccaggaagctgtagatgggagaatgacactagcagtaagtccccttagcctcacccaggagtgggcgccctagagtttatgataggtgatcacagactgagatagctagctcagccacccccaggtaaaaccaagcacagtccccatttgaacccattgatccctctgacactttctgccctggatgtccaagtattacttgggtctttcctctaggtactctagagttctttcctcaatgccccacccgggcttgaatagaccactaagtaaccgtgctcccaactcttcatttctcccactaaaacaccgtgtcaagtcctgaggccctacacatcagggccttgt

SEQ ID NO: 138780 - DNA, 1044 bp, Homo sapiens
aatgagactttctggggcaaccagagcaggcatcacaggattatctgtaagtggcttgataaagcaaggaaaggagactggactgagatttttatggtggtgagggaggaggctgaagtgaatgttcctgtgcatgggatggggcctgcatagtttgaatctatggccagtaaaaaaggagagagacccaaggctttcttatcaccttgccaagatgtgaggcacgagaagaagaaggggaaatgagctttaaaagctatcagaatttaagctttgaaaaatggaatcagactcttgattacaacatgcttctgatgacagtatggaaaagtgatagaactagggtccttgatcatgttattcaacctctaaaatgaccttggaaccacctgcttcagacttctagggctgcttaataattcaatgtctttatggttgaggatacttttagctagactctgttacttgcagtcaaaagaactctggatgatacaatgttgaagatataatcaattactaccatgttgaatatattcagggaatacaaagacaatataataaattcatcaatgtaattcataacaaaaataaattaaaggagaatatcatagggtcatattaataacatacttaaagtgttttcataaaatccagtaactatccttaataaaaacacaaggtaaagagaagcagaaagcacctacctaaaaactccttactaaaactaacaacaaatatcaatctaaagagtgaaacaataatgtttttaagatgatcagaaattacagaagaatgctattacaattatttcacatattctgtgagtttccaataaatgcaataaaggaagagaatgatatagcataataactactgaaaaagatacaactttttctggtgtgagtgtatgtccagaaaatgcaagagacattaataaataccaatacagttaatacaagtgtcaagattgctggaaacagggtaaacataaaaaaaattctcctatagtaggaataagtggggatggatagaaatgggggaaat

SEQ ID NO: 138781 - DNA, 1045 bp, Homo sapiens
tacctgggaggctggggcaggagaatggcgtgaacccgggaggcagagcttgcagtgagctgagatcttgccactgcactccaggctgggcgacagagcgagatccgcctcaaaaaaaaaaaaaagaaaagaaaagaaaaaaagaatgaattgtgaagctatggggtaagtctcacagaatccaattgcaagaagcacatcttggactcaaaggaatacagaattagattataaagcttcaactgagagaatacatgggtgatgactacaaggaaagtttagggaaaaatgaataatgaataataacgtgcactgcatttgctaaaatgtattagaaagctagaatcaggtgttaggtgggtataagaatagagcaacagttcaaaggacaagacacagtatacacacaaatatatacagcagtatgtacgtgtatgtgtatatacattatgtatatacagtatgcgtgtgtgtgtgtatatatatatatatatatatttggtatttgataaggatgttgttttcagatgagtggggaaagaatggaacgtttaaaaatgatgctgagggccaggcatggtggctcatgcttgtaatcccagcactttgggaggccaaggcaggtggatcactttaggccaggagtttgagaccagcctgggcaaaatagcaagaccctatctccacaaaaaataaaaaataaaaaaaaattagctggccgtggtggcacatgcgtgtattcccagcaacccaggaggctgaggtggcaggattgtttgagcccaggagtttgaggttgcagtgagccatgattatgccaccgcactctagcctgggcaacagagggagaccttgtctcaaaaaaataaattagaaaaaatatgatgctgagatactaagatactaggttagttatttgggagaaaatacacttagtcgcctacctcacaataccaaaataaattcaaggataattagagttaagtttttaaaaaaaaactataaaagatatagaatcaaatataatggctgtttattttatctc

SEQ ID NO: 138782 - DNA, 2755 bp, Homo sapiens
atatgtacacacacacacatatatatacacacacacatatatatacacatatacatatatatacacatatatatacacacacatatatatgtatatatatactacattcttgatcctaagtcttttttaacttaaattttattacttatacagaattcttatttatactttaattataggtgtgacgaagagaaagagagtagggaaatacacaggcagtggttttaagtgtagatgatggctccttaacccagtgtcattagataatcaaacctaaagtcttcccatattaggcaagcgcaattctctattttggacccttcccattcttcccttaccttctgcttttcgtactgaggaatttcgtgtgattttagataaagtgataatgagatattgagcaaataagaaaatagaggtaatgctataaaaaactaagctatgtacactttcaaaatgcatgtttcttgcatgctttttactacttaattgcattctttgctaatttcctttccttgctgtctgttcttttctaacagctgaagaatgttctgctgactctgacctcaactttcttattcctgttgcagtgggtgtggccttgggcttccttataattgttgtctttatctcttatatgattggaagaaggaaaagtcgtactggttatcagtctgtgtaatcagttaaatctagtgtttgtttgtttttttcaattagaagttacgtttccattggctaaaagccaggacatgctgtgcaatagattgtttaagatatgcagactaacttcagtgagttcctagctaacttgggcatgagtacacttatttaagacaaaatatattaggaccaatttttttctgttttttttcttcctttgttaaagtataattaaaagaaaaattgtggcttagaattttttaagtaaataatgattttaagcccctggatccaattatgaaagcatttttgctgatgtgtaattttatatgttacagttacttatattttactactttgatgttatttgcaaaatcaaaggtgttaaagaatttaacttgcttcaggaaataaattcaagaacatagtggattcattttcattggtggcagacacgaaatttggttcatgataagacttcctttccccacctcctgatcagcattatttaaatctgtatttttctgttagttaagaaagaaatggcttcatgatattgtatttaatagcaaaagtttggctgtcttcttcattactgttaatagctactatattttaacaaggagatttctttttttgttgttgttgttctagagtttggaatatactgattatctcagacttgacatttatactgaaggatgaagtaagacctccagctttttttaaaaaaggtgttgatttggaacacctgtatgggttatggtttattaaggttatggtttagaaagtttttttccctcagagccttaacttgttaagaaggttcatttatcctgcactgaaaacaaaaactctatatactttgtttgtgtgcctcctgcactctcccattccctatgtgaatatgctctagttgatatttttaatatattgatttcttttttctcacagcaacaagtgcttactctagaggttagtgggccctgatatgtcatcagtcagatgcctgcctagccaaagctggactaagattattctgtacatttgttgatcttgatatagacttatatccctgtagggactgctaatggctccggcttctggagtaaggtactggagaccactcatccctgtgtctgcttgattggttcagctgttgaattgcccttttatttggaagcagtgttgaagttgtctagggttcaaatggctgctttgtacacctgtcattagtataaggcagatgtttattttatcaagctattttatctctacatttaactaaaaacaaaagttcccaaagatctgccttcacttcagaaattttttttggattaaaaaaattaagcctgaaccttaaataaagtgagttggttattcattccaaggattaagtcccaatctacctctcagcacaatgcagaagctcaccactgtattgctgccattaactcatgccagaaccctttgccaataactggaattacaaatttttgttaaagaaaatttatcaagatctttctttactgccttctctatatgtacatctcaaaaacatgtacatctcaaaaactggagtagaaagttagattgctcaactacaactcctctagaactctatagctctgacatacagattcacactctcctctatttgctaagtatgtaaagaatgttttcttttaaaatgttctcttttgagaacaactgcttatttgttataaaagcatttggttaaaatgatgtcatcataaaaaacagtggctttgtttcaatacatatttttgagatgattatctagaagccagattaataaaatcagcttgtgaccttgctaagcatataaactggaaattcagatacattcaaaattatgggttcatttaaaagtgttctaccttttgggtatgagactaatatcactaattcctcaatagttatcatggctctatcttaattaattagaaaatatgtgtgtttaattctttgagaattaaaatagagaatattaacagagggttaaaaactgcttcaactccaataagataaaggaagctcaaaatctatgagctgagtgttcaattagctt

SEQ ID NO: 138783 - DNA, 3630 bp, Homo sapiens
gtctttccaccttaattgaaacgttccatccttagcttctctggcgccattttctatctgcccttttacatctttttcctactccattgtctatcccacaggtattggtgttcccaagggtttttgtctctgatcctctttttattctacttccccttactgagaaatgttcttgcccatgttttaactaccacttaggttcatatagccacttggttaggacatagtgattttttttttttttttgagatgggttctcgatatgctgcccaggctggtcttgaactcctgggctcaaacagttctcccatctcagcttcccaagtagctaggactacaggcgtaagctaccatgctcaactaaggacacagatatcttaaactcacatatctaaaactgagcatctctctcttccacgtatcctttttaccacctgttccatataactacaaaaaactgaaatgcatatattcttcctcttttatagaatggcaccagcatctacataatcagtcaagtgtggaattggaaaccattctattatctcctcctcgtacaccccctacatccgtttggtcaattttgccttctaatttgatctccagtctgtgccttctgcttttcttctgcacttcattaatccagctcaggacaatattattggttacctggactctagtgataaagatatgtcctaccttactacctccatctgccataacttctgaaatgaaatcctgcttaatatcctgctgctgaatttttttttcatcaggataaggccagactacctaagagcatatagtacctttgtgacctgggtccctgcacactttttctgccttctatccagccaaaaataccttttgatccattgttctagctctgccaacctgcttgcgtttcccttgaagtgctatgtctttttactctccatatttttgtctgtgctatttcttatacctggaatgcccttcccccattacttgcatcattaattcctattcattcttaaaatctcagctcaagtgtcaccttttcaaagtgtgtcttatgtaataaggctgaacttgagtgtgcctctgaaatttttccatggcactttgtgttgcctactcctaccacaacacattttgaaattataaccactgatttttcttgtctgactctaacactagactgagcatcttgaggcaaacagttatgtcatcagggcccacttatatctcttatatctcttttcccattagtaaatgatcccagattgtaatgtattgagttcttatgtctgctttgtatagttgttcattcagtgagttaatacttaacagcaatatttgaagcattgtgcttcttcgacatcataacagtttgcctctgaaagctcacggcctgatcatcaaggcaaggctaattagatttgttcattatgttctgtttaagaaatctgggaactatgtgaccatgttatacatttttcatccaaaatgactgcatttttacttggtacttaaaagtgtattatttggttatttggaaaatcacttttgtggaacatctcatttgctgataatgaaatgccaatgacttgttaccttggtataaaaaaccaaaatatgcgtgttaggaagtgctgtcattttactcaaaatacacagatttgaaagtttgtcactgtttctgttctcaattgtcctttctccacatctagctcaagactgcagtgcagatgacgacaacttccttgtgcccatagcggtgggagctgccttggcaggagtacttattctagtgttgctggcttattttattggtctcaagcaccatcatgctggatatgagcaattttagaatctgcaacctgattgattatataaaaatacatgcaaataacaagattttcttacctctcagttgttgaaacactttgcttcttaaaattgatatgttgaaactttaattcttttatcaatcccagcattttgagatcagtctttattaataaaacctgttctctttaatcagcttaaaatccaaagtgtcatatttactggtcctggagacaaacttgttcaaaagaacatcaacgtgcaatgttttaaggtctatcttaagaagccctggccaaattttgatcctaaccttgaagtatgccttgaacttattaacatggccattataagaataaaatatgtagttgtgtcttaatggaattaataaatgtcatttcactactggtgttctgtttcaatgtataaggactatagtgatttaaactcatcaatgtgcctttgcataaagttcattaaataaatattgatgtggtataaatgcccatcagatatgcttaaacttggttttcagttgaatgaagtagagaatgtcctcaggaccatcagcattttaaaggttatgtgacttttgctgatttctctgagttcaagttaagcatgaagttagtacctcaagcctgtgatttttccctagggatgatacagacccaagaggctacaacagaacttaaactggcttcgtaattagagtttttaagataattgtttgtttttcagcaatatagactgaaaagatccaagcatatttagccacttgcttttttgtttcttgttttgttcttctttggatgcctgattagtattgaaagatagaaatattctatgaactaattaggacagattgtgttgtgtttctctacctcatcttgttgatctctggagcattaaaatctatttagtgttgtcatcagtgtggtacttatgaaatgtaagctaacagcaatctcagaagggaggcagtgaagcatagcaactaggctcttgtttcttcaagatggcccctgtggggcagtgcatagatgggggtgtaaagagaagctgttggcattaaaatgagctagataatcagcccttgttgaagcatattccatggtataagagtagcacagacatgaaacatagataaagaaggaaggcttaatagactagaagacttccacattgaagtattattaacccattgtatgtatataggggcatgatcagagtctctataacttcctgattaacaatacagtgtatcttgttacccagctgtcagtctttgagagctttcagtaaaatatagtaaattctttcagcataggctaatgtgtggttactgagatgagtgttgtgtactcagaaccgtagcaacatttttatgaatggtaaaagtacaagaggaggaaaagttaaaattagaagaaaagtacaagttattgcttaatcataaatcacaccagataacacattttgttaatttcattagctattactggaaaggaccttaacgattatttacagaaaggggagtgaaattcattgaggttccatatcaagtgggcaacaaaactattactagcattttgataaaaattgcccctaatgaaatctagtcactcaacagtaaaacaacagctggtttacacttgaaattatgagatcagaattgggcactttgggcttccgtactatgttttgcttaagttttttttttaatactaatatgggctttttcagtagtaatataccaaaacacttctattttaatctctgtttgctacttcaaaacct

SEQ ID NO: 138784 - DNA, 1656 bp, Homo sapiens
tagtggtgtgatctcagctcactgcaacctccgcctcccaggttcaagcaattcttatgcctcagcctcccaagtagctgggattacagacgagtgccaccacacctggctacctttttatttttttagtagagatggggttttgccatgttggccaggctggtctcgaattcctgacctcaagtgatctgcctacctcgacctcctgaactgctgttattataggcatgaaacgctgtgcctggcctcaactggtttttaagagaagttttattagtttttgttgtaaatgtatacctcagctttccagttcttgtgttgaaaattgtgtttgaaaaatgtctgaactggcagaaaattgaagattaacagcatttttaatctacatgaaacttcttactgaaattttagtggccatggaactttttaatctttaaaaatctttattgcttctgtggctattaaattcttctgcaaatacacttctcttttccccagaagcattttcaatacagcgttaagtatacattaggcaagtagatcagatcaaaatgacttataggatgagattttcttttcttcagaatgtgatcccattaaagttactgttttaccaacattttttccattaactaaataatttttaaaggttgaattcatacaatcaatagttattataaattaatatttcacatactaattgagagcattttaagtaaatgacagtatctagaaagatctttgtattagcggaattgcctttttgagctactctgagaatatttgtcttacatgaaagccttattggcagtatttatgaaagtcgtttcagtactaggtcaaatacccaatttgggaaagagagaactatgagtctgttgccagaataagaaattaatctactaatgaatttttaaaaaaccaagttatattaaacccacggcataatactttatggtacatgtcacctaatagtttatgggctgggtggtaatttgggaaattgtaggggaggtgctaactggggattcttaacaccatctattcacaggtcacatctggcagcctcagctctctggattcttaacagaaccaagaagcaagtaaaacaaataattgaactggcagcccaagtcaatgtcagaaaagtttataaactccagggttgcattttgttcctagttattgccccagaggctagtgggggcggcggggaaagcttggcacatttcttgaatgcaagcacaatcagaattgccatgcagcctatttgtcctatctttgatacaattctaataagcttagttatctgatttatcagtccctggtagactgcaagctaggcagagaactagggcaacaagacacaggaaatgggaaatagaaatagcagttaacttctttcctgcaagtgtatccatctgtagcattccttcctcctctccagtctcagagtaggttttcttttcctggttaaactgaggcaaacagttatgtcatcaaggcccatttatatctcttttcccattactaagtgaccccagattgttatgtattgagttcttaatgtcttacgcttttggaattcaatctcttaacttgtaggagaacttgtaccattcagcatcttctgtcaattgctaatggctgtttccc

SEQ ID NO: 138785 - DNA, 5547 bp, Homo sapiens
attacaagattaaaatttgcatgaagaaaaaaagcacataaaattccttaattgacttgtccttttaagcctattacctaaaattgggggtttgtggatcacaactctgttgagcagagctagctattccaggcatccacatccttttcaaccattaattctatggtttggaaggaaatgtggaagctgtgtttaaaagcgaatatactgtgagccattcgactacttttgcagtggtgttgaatacctagtctgacttggttaggccacaataaattgggctctccaccctaccattcttgcgattaaagacgttagttacactttaaaaatattttcaagaattcattttcccttttgtctgttttgcttatgtacttcaattattttgatcctttagtagctttatttttggactttttatctggctccccttcattattcccctaattttaagtccagatttgtgtttacagtttaaaatcgtttgcagtattagtatcatcacttcaagactgtttatctagtcacctgtaatagagatgagctgtgctctttctcttactttgaaactttggtttttatgtacatagaattaaaaatatcacccaaagagatatacagcatttaatactgatattgaatgtataatctatttgtggaactaggttcttggctgtgggtacctataaatacaacacataggtaatatttgactgtatggggaaagaaatagaattgcaataaggcagaagagtgttgattggattttactggatcagaccactttctagaagtagaaaaaaatagcccccttaggctgccaaccctgaccagataagaaatgcagtaagcacgctcaaattagtaagaggtcccagttttcttgactttgcagccactaaaattgtatgtactaagtcacgatctgcaaactttaaagttccaaacagtgagtgttttaggctttggtgccatatggtctctgtcacaactatttgaccctgctattgtagcacgaaaacagcaacacataaacagatgactgtggctgggttccaataaaaccttatttatggacactggaatttgaattttatatgctctcatgtgtcacaaaatatttttttcaaccatttaaaaatgtaaaggccatttttagctcttggaccagatctggcccatgggctacagcttgctgacccctgaccctaaagacagagccagcctggctattctcatcacatgataccttcctgatcctgtttccactttcccaaaagacattcactctaccactgagaggctaatctggctatgtaaaagtgggctagattagctccctttatttctgataaagtaatatgcctattttggaaaggacttggaatataaacaaacatatatgtgtgtatgtatatgtatatgcacacatatatatcacatataaaatatatatcatatatataatgtgtgcattatatatcatatataatgtgcatatattatatatatgcacacatatacaatgtgcatataatatatgcacattacaatatgagctgtgtttatagatgtaaatgaatatacatgtattcatatatatgaatatctgcatatatacacataaacaaatgaaaggacaaagaaagtcttagaattttaattctagaacagttctccattttctatagctttatcataaaaatatacctgtcttagttacttgaagttgatcttgtaagaacatttctgacttttaaatcaacatctttgacttcgagacattcttttgtgattatactcattatttattacacactttttctcacctacagcccaagagtgttcgctggatgatgacaccattctaatcccaattatagttggtgctggtctttcaggcttgattatcgttatagtgattgcttacgtaattggcagaagaaaaagttatgctggatatcagactctgtaacactaatcaatacgtgatctctgttacaaaagaaaaaagcaagtacaagttccaacatgcaatactggtcaacttaaggtatatttagttgcagtccagctctttagaatgggtggtatgggggatttcaaacttaaacaaaaaactatcaactacaaattagttgcctgactttggtttttccaaccaaggaatttaaaactgttatttttacagcaaaagatgtgcaaaatcactggattataagttctattttactgtcttgaattagtatttcagtgttttcattttagacattcagactaaaaatacaccgtttagaaaaaacaatttttgaaaaagagattttttttccctgcaggtagttgagttggaacaacatgttctaccgtggatttgtacttgctccttttgctctttttgtgtgtgtgtgtgtgtgtgtgtgtgtgtgtgtgtgtgtgatttttgtttgcaggttaacttagctactttggcattgctgcatatttgacctttgagagatataatagtagatttgaacaggggctggtattattatgttcttagcaataaatgcttttctaatgccttttgaatacatttgtatttatgtggctgtaatgacaaaagatacaaaagctttttaaaatttagagtaggtattaatcttattgtttaatcttttttttaaaaaaactggatatttcaatcttttaaattgcaatatataagactattccaactgggcatttcaatccattttttaggtgctttagagataattgcttgccagtgccaattgagggcattagtactttgtgctcataaattggcctctgtatgcagtactaaaattaatgcagatttctctttagccttccaacatttcttgttgatagtgatgtattttattattttctttttcttaagaaatgccagtgtgtcctagaacctagataacgaagtgcacttacacttataaaataacttgcatctaggctgggcgtggcggctcacgcctgtaatcccagcactttgggaggccgaagtgggtggatcacttgaggccaggagtttgagaccagcctggccaacatggtgaaaccccatctctatcagaaatacaaaaaattagctgggcgtggtggtgggcgcctgtaatcccagttactcgggaggctgaggcaggagaatcacttgaacccgggaggcagaggttgcggtgagccaagagcgcaccattgcactccagcctgggcgacaaaaacgaaactccatctcaaaacaaaacaaaacaaaacaaacaaacaaacaaaacttgcatctaaccaaaaagtcttggttttatcttaatccattaaaaagttgttctttgtttccagcttgcattgattgctacaacatcactaatttggctttcacatttaaatggttctgtgctaatcaaaactttcgttgttattattcattatggtagaatcatttttaattcacgtgctttgtgttcagttttgtggtctgagagatgtaccaattgtcaaattaccgtgtaccacctaatgtttataggagaaagcaaaatacatcagcttggtagttaacacatcaaatatttcttgctgcttctaggagaacttttttggtgtgtgttggaatggctgagcaaatattaaaattgttaatatgcagccatatatggaaggttcctgtggggttgttttttcgtgttttttttttttttgtggtgggattatgtgcctcccattcactagaaaatgagaaaattgtctgggttccaaaatattgacattgaatggatcaatacacacacacagacatatatatatatatgcacacatatataggcagttgcatgctagcatgggtatttttataacaatataactgagttatattggaattataaatattttccgtcacttaaatttgttctttgtttagcctgaaaacctttatggctcaagatcagattcctgactaacccctctcttagagctacagcgagctgcattaccagcttaaaacacttcttagggattaaatatagatgtaatttttcaaaatcgtttttaatttaaactgtgttttagtgtaaaattgttaaccttgtaagatggataatgtgtataagaatgtaggccttaactatttcacatgagtcaaaacaaagcagctttaaaaaaataattggaagcacaagtgcatggcactgactgaatgctgttaatatttctaaaagtttctacattcagattatatgcctgattcatagtaaaatacctctaataaacactgttttatagaaaacctgacttcagtgaatatttttgtattttacatgggccagtttatatactgctatttacactattatttcctatagctacatgttctttgtaccttttgtagttttatttgtattactagattcataccttgatggtaacgctctatctggttttgggtgtttttcatgttttagcatttgtataaagaaactggtccatgtaaatactttccatgttttttcttcaaatgtttaaaccactagttgatgtatggtatctttagatatttgcctgtctgtttgctcaaaattgcttctaaaacaataaagattcttttatttcttaaggcaatttgcttaccttttttcccgttggttaaagtcaagattttgtatactacataatggcaatttctttcaaatggaaaaactttagaaatgtttagaagtagaactgaattatttgcaaaatgttctgatgttctgtctgtatattaccatctggaagaatagtcccatacataggcctcgattgatgctaggcaggctacagaataagatcaacctgggaagcgttttataaaaatagattccaggctgcatccttagaggatttaacgtagtaggtctaatgaggagacagagagagagagagacagagagagagagagagagtgtgtgtgtgtgtgtgtgtgtgtgtgtgtgtgtgtgtgtgtaagctcccctgctgaacctgatgcatagtcagttagggaaccagtgatctagaatatttatttcataataaaagctgcggagtatctctttgtacacttttctcaattcctaagttgaggttgatattcaatatctctacatagtagctttacattgcagccatacatattgagctattgatctgaaccaacgtaggattgtgtgcagtctctctcttacttagatcactctaaaatacttgagccttccagtttccatatacggatagttacctagtcaccttactatatcacataagaaaacttagcaatgtagctggtaacttttctctgaattacccagttaagccatgtgaatgccagttagtcatcacggctgcaaactctgcagttaactaccattgtctttggccaagttgtttaacttctagtgtctcaatttcttcatccagtgggtgggggctttaaaatcctgctactcatttctttgagtgataatttgcatttcagaggaatgcatcatagtatttcatacatcttagtat

SEQ ID NO: 138786 - DNA, 1506 bp, Homo sapiens
ttaagaacagtgctgggcacttagtaagtgctcaaatgctagcataaaaatttgagattatgcttattttctaactaccgttatttatactcttgctctctcaaataccccttttcccacttgtttcctaagagaatcctgcccggttcaaaatgccccatccctaagctggcattactttttctcctcccttatttggaagtgatttctctcctattttcatgacttctcactttcttttttgtaatatggttgtttatgtgtttatcttaccttccctggcagattgcaaacagggtgaaggcaggattgaagtgtggttcattttggtagctcctggagtacttgcactctgaaattattagaatgactggctgatcagatgagtacttcagaaagataatagcagtgaaaaggaaagattaggactggaggggctgaaaggcagggagcccacttaagaggctgctgtgatccaggctagaggtggtgagggctcagcaagtgacaggaggaataaaattgaggccataaatcttcaagtgtctgagatccacatgactacacctgtgctccaaaagttggaaacaaaatacagaggaaagggatttctgtcagattatgagttctcttttacttagttgcagtttattctaccgcatgatttcttcttctgtgtaatagtgttagattgcttttcttctgtgggtattaaccgtatctgttatctgtagacagttgtgaaatgttaattaactggaagctctttttcaaacagaaaaatgaaaaccgattttatctgaaggaagtgaacatcagcatgtatttggttaatggctccggtaagcaaagcactggcctggggaaaaagactgtggattaccctgaaggattagaaattacaatggtcttattaccaaatagtgccttatttaatgaaacagaagatgctatgtaaaaagtgtaccttgatcataccttaaaatcagtaacttagaactatgatgttctgtctttttctgtatcccattttttcaaagtagagtagataataattaaggatatgactgatttttagactatagaaacatctatagaaagataagggaacctagttatggtaagaattgctttttgtgggttgatcttgtcccccaggccttcactgaaaaaccctgaggactgttcctttttttttttttttttttttttgagacagggtctcgctctatgcccaggccagattgcaggggtgtgaccacagctcaatcccaggttcaagccaactacccacctcagcctcctaggtagctgggactacaggtgtgcaccatcatgcccagctaatttttttttgtattttttgtagagacagggtttcaccatgttgcccaggctggtcttgatctcctgggctcacgtgatctgcccaccttggcttcccaaagtgctggaattacaggcgtgagccactgtgcctggccaactttcccatttttgatgttg

SEQ ID NO: 138787 - DNA, 1460 bp, Homo sapiens
gagctttgattagttaggagttactataaccatgatgtgttaatgtcactttcaggtgttgtgttggccggcagaaaacctagcagtttaaagtactcttgggggtttagattctatttgccatcagtggatcagagtacaaacaattggcctttatttcagtcagtttaaaatataactccttcacactttgatctgaaatgcactgtaggttggcgtacaggagtggcacagctatccgtttctccagctatttgattactcggatcgtgtagacatgcccgagtacatgatggcacttctagttgcaatgttccactcaggctgtagagggattgccaagaaacaaatccgatttccaggatcttgtgacttaaacaagcgaggcagatggctcttgtgctccataaaaatgtgtgttttcatttggctcattactgtagaagcttccctcttgtttttttttttaagttgtctgagtcatagcttgaggacccatgccaactttgtttgaaagtgaagacaccatgaattttaagtatccagacaaaagattttttgttctacgctgaagttgattttgtttggtagagtgtaaggctttgctggccacttttatagctaacctgtaccttttccctttcttcttctcctgaaggttgcttcagttattaacatcaaccccaatacaactcactccacaggcagctgccgttctcacactgctctacttagactcaatagcagcaccattaagtatctagactttgtctttgctgtggtgagtaacagattttttaaagttaggttcattctcttagaaacacatctgaaagtctaaatagttgcatggggggaggggggtatttagctttattttccagttctacagtactcaattataaagtgtagtccattcatccctgttcatccctcagagtctgtgcaatggtctgtggactggactcttgcattaatgttcaccaagagtggccattttaccattagagagactctagggtagaagcaagaattaactcacatcaaaaaaaagaaaaaaacgaaacccacaattgtctaatctatccatacataagtaatttccatgataattttttctctgttattggttaggtagtgctcatgtttttctgtgatactatttgaagccatttggaggctatattatttgtgatagtgtcagtaataaaaataggtaacatctattgagtacttactatgtacaaagctctgtgttaagtgtgtatatgaattcattaaatcaggacaatttataatggcagcattcaggtttttgttgttgatcaagagctgaaacctaaacagaaggttttgggttaagcatacctgttctacttcttgctagcataaattaatcatcggggatctttatttccaccttctcagaagcaactattattcccataatttctgtgaag

SEQ ID NO: 138788 - DNA, 1134 bp, Homo sapiens
ggttcatttgtatttaagtcctttgatgatttctaagcttttttctagtaaacagtatccttccttatggtgattgtatgtgggaataaagaaccaaaaaatttaagacttaactctctgaatttcgtatcagaggcaggcaaagttctttgggaataaaaagatttaagggtctgaaaaagacgagtatgtggccatgtgggagcagataaagcatagggatgtgtcctgagtttgctgtgtcataactcatgtagatattctgtatatgaagcagcagtttaagaacctctgcctaatttagtttcaaatatactaacaagatattctcttcccctaatataacccttttggacttctattatgagaattttttttggttttccctggccttatgaattaagaaaatgtccgctttggtttcttttgtcccttttcgcttgttttagagttcctgtgtgataaagacaaaacttcaacagtggcacccaccatacacaccactgtgccatctcctactacaacacctactccaaaggaaaaaccagaagctggaacctattcagttaataatggcaatgatacttgtctgctggctaccatggggctgcagctgaacatcactcaggataaggtataggtgtctatctttatcaatacatcctttttgcatttcatttcaaatattgcgtatcctaccttcagcccaaaggtagtgttactagaatgattccgttttctttttgtttgtttgtttgtttttttgagatggagtcacgctctgtcccccaggctggagtgcagtggtgcgatctcagctcactgcaaactccgcctcccgggttcacgccattctcctgcctcagcctcccgagttgctgggactacaggcgcctgccaccatgcccggctaattttttgtatttttttagtagagatagggttttaccgtgttagccaggacggtctcgatctcctgaccttgtgctccgcccgtctcggcctcccaaagtgctgggattacaggcgtgagccaccacacccaggtttttctttcttttttttctgagatggagtgtcacactgtcgcccaggctggagtgcagtggcatgatcttggctcactgcaacctc

SEQ ID NO: 138789 - DNA, 1051 bp, Homo sapiens
gaatttgagtaagcggaggattttgagcaggatgtttccagcagggggaagcatagcatatgcggcagtaattggagagctgcctgattaaatcaggctgtgtgtgtagcagaaggaaaataaagttggctaaatgaagtgggcctaaattatagggggccttggaagccaaggaaagacatttagcttgatggggcaggcactggggaatcattttaggtttttaaagcaggagaatgatataacaaaagcagagacagtagcttataaagaatattctgcaggattagttgagaagtgaggaggctacaagcagagatgctggcttaagaagctgttatagtaatcaagggctgatgtaataaatgcctggactacaggggcatcagttgttagcagttattaggaggaggtgtttaatctgacatatttggatagaaaaactatggaccctgaaatgttaacacttctctctttccccttttatttaaaacaaagggaggattactttttaaattactaccttctatataataatatttgaaactatttggaatgttaaatggcttcctgaaatggactattaataattgtttttgatatagttcagtgtttcaagaatactaatttatggctgggcgcagtggctcacacctgtaatcccagcactttgggaggctgaggctggtggatcattggaggtcaggagattgagaccagcctggccaacatggtgaaaccctgtctctactaaaaatacaaaaattagccgggtggtagtggtgcgtgcctgtaatcccagctactcaggaggctaaagcaggagaatcgctttaacctgggaggcggaggttgcggtgagccaagattacgccactgcactctagcctgggcaacagagggagacccttccttacccacccccaacaacaacaaaaaaaactaatttaggccaggtgcagtgactcaacgcctgtaatcccaacactttggaaggccaggcagatcgcttgagctcaggagtgtgagactagcctgggcaacatagcga

SEQ ID NO: 138790 - DNA, 1062 bp, Homo sapiens
catctcctcttaattcctttgccttcttattttctttttgttaaggtcctcactacttacaacctaattttttaaaaaatcagtttaagaacagcagctcaagccagttttccttttctttttagacatacacgaatttatccagaggagtggtatgtagcagaagaatcagggactggtttacacagcaaaccaggcaaagggcaacctggccatggagaatgtatgatttaggctgaagtggcatgccctacataaatgcttggtgttccttgctgcctgtttgtttctcacccccaaatttctatttcttttagaaaactgtaaccatttcagaccatggcactgtgacatataatggaagcatttgtggggatgatcagaatggtcccaaaatagcagtgcagttcggacctggcttttcctggattgcgaattttaccaaggcagcatctacttattcaattgacagcgtctcattttcctacaacactggtgataacacaacatttcctgatgctgaagataaaggtaaccttaagaatggatttgtgttatgttctcttgctttttattaatgataaaaatgtaaacaattttaaaattgttatgaatgtctgtcttcctaactagcatggaaacttcatgtctttataaccctcccactgaccccatgcatggcacatatgacaccatccaacatactgatgatatttgctgtcattgcttgagtgacttactgtataccaggtattatcctagtatacagtaagtcaccttactatatatatcctagtatacatatatatgtgtatatatatacatatatatgtatatcctagtatatatgtatatatatatatacacatatatcctagtatatatatacacacatatcctagtatatatgtatatatatatcctagtgtgtgtgtatatatatatatatatatcctagtgtgtgtgtgtgtgtatatatatatatatatctcctagtatacagtaacacacctagtgtgttacctgcagcatctcacttaattcttaacagcaaccctggga

SEQ ID NO: 138791 - DNA, 1052 bp, Homo sapiens
gatgacagtggattgctcagatattattaaagagtatgcaagtatcttaacaggaaacagcttaccctttgggtaatgtgtgatacagtgaagaaaatcccttaaatggttgcccaatatttatgctgctggcatgtttgctgggatattttttctcctctgaattagtattttgagtccttgggctcttcagtttaatagataatgtttctatgtttaagtgtagaagatccaccatgttagctgaaaagttccaaggcttttctgtctctgtaacatttctctgcctaaagaggtagcaggttgaaaatttaggaaataactttgcgtcaaaaaattcatcagcctttctaatcaattcgattttaaagtgaaacagtgatgaactttgcatttatcagaattcatgtttttctcatggatttaacagccctttgcaactctgcttccttggttacatgatagaaagagtatctgatcacatcagaataaaatcgtttgggaagacatccgtgtgtcatagattatgtagcttgcaacaggatttaaagcaaaaagatggtagaatatcggatctatcattatttttgcagtgaatgtttcaccagctggtttgagagaagttttacacccctaccaggcttcctcttacctcatttaccgcaaaaaccacaagtcctaacaggcaaactgtaattgcctaaaacaaaactagtaaggtataaatgcatgtggaaatgattatttgaaggcaaaaggcaaataaatgtcaccagtctgagccatgacctaagcatcctaggtctagtaaccattcttttggtaagggataatgccaacttttttatcaataggattctgttaaaaatacaaagaaaaacagtcagcaggatactgtatctatacacatacatatatgtatatacacatatatgtatatatatgtatgtgtatatatagatataaaatacttttgtttcattttagagctggttgaacttcagtggtgggtagagcttgtttttaatttatataatttttgtagtacaatt

SEQ ID NO: 138792 - DNA, 1920 bp, Homo sapiens
cttgacacaggtggttttggtttgtgaaattatttgagctgtagacttaatgttacgtgcacttttcccttacatctgttatactgtgcctgtttctgtacatatgttacatatcaaatgtttattaaaggggtatattgggtaactcagaatttctggtgctcctggctatatataccaaatcccagttcaggattcaacaacccagatcatgctgctgaactgcactaccactgccaagtgtgaaattgaagcttgctctgctggccttgttgcctgggagcttgatcctgcttctgttactccacacctgtctccctccctgttccattcctggctccatttgcagccctcctttcaaagtgtggggtggatacctttgttaggcagagcctagcacaagtggtcctccttactgcaagggagtctgggaaagcaagtatccagtgttttcagcttttatagtgggtggtgatttctgccagaaattgtaacaaggggacaaggggtgtttcagatttggggcagccaaaaagcgagcaaaatccatctttgaggtgagcatttaggccaatagaagaaagtagatttcaagtgttaggaacaatagaagcccagggtagaggttgaatagagtatggcatttgagcccagtggaaacaagtttaactggattaaagggtgtgctctgggaaaatagtttgagaaaagttgaaggaataggatgggacaagattaaagattactttgaaagtcaggcagaggaatttaaatttcatatgggaatgttggagccagtaaaagtttttgaacaagaaagtgtcctaaaaggaaatggtacttaaggattattaatctggcagcacttctaggggtatctaggcattttctgtcataatttaggtgtggggtgatagattgggagtagaaataaaagacaaagattgtatttaagagaagatttgaaggaaaaaaatcaataggacttcttgaagagaaagaagtagaggctatttctgaaactgagcttgagtgactgatcccactcttcatttagagctagcaaagctgaggagggacccagtttggaggaagcagaagaatgaattttagtttgggaattgctgagtttgaggtgagagatattgagtaaaagtggtccctgtgcagttagagttggggaccaagaagtggaaagaattgcactcaggcagaaaggctgtgaagggaatggaacagagtgtgccagaaccctcagggtgtttctcagctcttgtttacgggccaccaggtatactatcttgaatttaattttaagtgatacgtttgaaccacaacctctaccttttgtttcataaaacgtcagttctcacaccctaagacacattgatgcaagctatcgatgctattactattttacatggtcttcttcctgttattctaatatatttggaaagaaaatgattaatacatgtgaggcttttcttggtaattttcaatacttttgaatgttttgaatacaaggagaataatatactaaagctagagaccttaaacaagaccgagaaaagactgcatataaaaagcaaacctccagttcattaaaattgtaagttggagctcttggctccatggcagggagccttggatcagtaagtataacagctcccttccgtattgtacttagaaaagaatgatcataaaacctacttaggcctcacaaggtctttttgagccttagccaatgcatttagtcactgtcagtaaccacaagctttagtataatattctggcttgcaaagcagccaggtctccagagcatgacgataggctcttctatacaacttgaaagctgttgctgaggcataccttcttgatattcctcttagcacttttctctagtctatagcaagtctgtac

SEQ ID NO: 138793 - DNA, 1325 bp, Homo sapiens
atattcatctatggttttttaatgtcataaagccttttaaaaattgggtattgtaaaatcaaacacagcaataaggatggaaattgcttgctagatactttttaataaagtgtaaatatttcaactgtaaacttaccttttgggaaaagctctgttcctagcttgacatccatgtcaaaatttattgaagtgaaacccaacatggggtttgagggaatatccagaagactgatatgttcaagatttggaagagctaaaggactggcctctctgtaattagattaagctatgttttgggtccctattgcagtgtgttttcaccttgatataattaatcagtatttattgaaaatctaatatgcattcagcactacttggaatgataggagatagaggaaaagtaatacacatggtgtcccctaccatgacactcatgatagatgacattcatataaaagacacactgctaggggttgtgggatacatcagatcatctgatcaagggagcatactggagttcaaacgagtgacagaaatgttatctaaagggaatcttgaatctatccatatatatcattcattcacagacttggtactttttttattagtaacaaattacttactgtatactataatttaccatggcacaccagtttgttatgaagtgacagttgaaaactgctgtgttggagcttatgacagtaggagggacaggatttactgctataaaataactgaataattcaggataatgtaaaatatactgaaatgggatgtgcattattactgctccttgagggcttttatagtcagggaaagctttgtggagaaaatggctactgaaaaaacagatagcatatcagcccaggttcttaattgcaaggaagagaaatacaatctgattgattttaagcagaaaagaatttattaaaaagaactgggatataatgcataccctttggccccacagtttcattcctagatatacagccaacatacacgcatacatgtgtttactaatatgtgcaagaatgtttgcagcagtgtttgtaatagaatcacactggaaactaaatgcccattaaaggtagcatagataagtagtttttttgtttgtttgtttttgtttttttttgagacagagtttcattcttgttgcccaggctggtggagtgcattggcatgatcttggctcactgcaacctctgcctcccgggttcaaacgattctcctgtatcagcctcctgagtagctgagattacaggcatgtgccaccatgcccagctaatttttatattttcagtagaggtgggatttggccatgg

SEQ ID NO: 138794 - DNA, 7549 bp, Homo sapiens
caatgagaacacatggacacagggaggggaacaacacacacgggggcctgtcaaggggtgggggccaaggggagggagagcattaggagaaatacctaatgcatgtggggcttaaaacctagatgacgggttgataggtgcagtaaaccaccatggcacatgtatacctatgtaacaaagctgcacattctgcacatgtatcccagaacttaaagtaaaattaaaaaaaaaaaaaaaaaagaaagaaaaagaaaaagaaaatgccgtccgcgcatatctctcaggagcataggaagggctgtgaaccaaaaagccagggcgtggtcgccccgcccaccggccgctacatcaccacccctctcgccgctttcaagcgcggagattggctgtaagcaagaaagagccccgcccctagtcttatgactcgcactgaagcgccgattcctggcttttgcaaggctgtggtcggtggtcatcagtgctcttgacccaggtccagcgagccttttccctggtgttgcagctgttgttgtaccgccgccgtcgccgccgtcgccgcctgctctgcggggtcatggtgtgcttccgcctcttcccggttccgggctcagggctcgttctggtctgcctagtcctgggtgagttgtcgggccctcccgattagtctgtccgcctgggcccggggcaccagttcaaagctacaacctgaaagactggtccgagggggagggggttgagaggctcagcagctaacactgggcggcggcggttggcccggggaggcaagcggtgacctagagaaggcctgaccgacggatggcggggaagaagggcccaggagagtaagaaggggccggtaacggggggtggacgccgagggagtaggctgggaggagtgaagcgtggagagggtcagcgtggaaagagtaacttggggaaaacactgaggagtgagcgtaggagggtggtacatgcagattttgggcgccagagacaattaggagagtcttggtttgctgagatcagggaagagttttgaagatggtggaaaaactatggggtgagataggaaattaagagagaagaccatgcctgcctggagtagcttgggagaagtgtgtgggtgggggacagatgggacagataggacagtagagcctgaggggcaggggcagtgacagggttgggcattttgaaggttggaatttgagactgtgaagaaaggatgattcaagagattaggagtgatgctgggtttgagtttggtagtcatagttttaagggcgaaggaacctaaggtagctggggcaatttccaggaaagaaaacttggacccaacctctggagactaaggggttcagggggaactttgatggggagtgcacatctgacttggaggtattgaggatgtcgattttctcccagttttgctacttcctcccagccagacgctgacaaaaaaatccccagacgtttcagttaggagggcctcccagatgtgaggttttgggggtggagtatttgagtttggtagactacctctttgccttcagagtttcttcttttctttcttccccatcacacagctagcctattacctcatattttgggggtgcagggagcaggtagacaaacttgctaaggattgggttgttaccagggcctaagaatggctggatggggccgggcgtggtggctcatgcctgtaatcccagcactttgggaggccgaggtgggtgtatcacctgaggtcaggaattcaagaccagcctggccaacatggtgaaaccccgtctctactaaaaatacaaaaattagccgggcgtcgtggcacatgcctgtaatcccagctgcttgggcggctgaggcaggagaatcgcttgaacccagaaggcggaggttgcagtgagccaagattgcgccattgcactccagcctgggcgacaagagtgaaactctgtctcaaaaaataaaaataaataaatcaataaataaatggctgggtgaatgttcgctgattgtgttgtgccctaataggcagtgggtcgctaacaactttaatgcctaaaagtgaactttgactaaagtgtctcttcctgactttgattcatgctgtgcttgttgctacccacctgctcttgctatttgtgacttaataaaataacataaagaacagacccagatgggagtggggaagaaatagacatattaggggtctgagaaagcagtgagaggtatacattttgtaattcacatttcagtagaatgaaatcaacaccctggaatagtgattctcaaccaggggacatttggcaacatctggagacatttttggttgtaacaactgggggattgcttttagcatctagtgggtagaggccaaggatgctgctaaacatcctaactaagcacagggcagcccctgacaacaaagaatcatctccctgaaaatgtcaatggtgccaacattgataaatcctgctcgaaaaccatagtattggaagggttcttgattatctaattcagtgactctcgaggaccttttcatgcgtctgtgaaatcaaaacttcggaataaggttaagaaggtatttgtccttttctgctgggcacagtggctcacgcctgtaatcccagcactttgggaggctgaggcgggcggatcacctgagatcaggagttcaagaccagcctgaccaacatggtgaaacccagtctctactaaaaatagaaaaattagccggtgtcgtggcacatgcctgtaatcccagctacttgggaggccgaggcaggagaatcgcttgaacccaggaggcggaggttgcggtgagccaagattgcgccactgcattccagcctgggcaacatgagcgaaactctgtctcaaaaaaaaaaaaaaaaaaagaagttatttgtcctttgtccttttcactctcatcctctcaccagtgtacagcagagttttccagtggctacgtaacatgtgatgacctcaccactctgatgttcttatattttattcatttctcagttttaatttctaatactgtaaataccaatacatatgactcacataaacctctgtgaagtcctcagtggataagaaagtaaaggggtcctgacaccaaaactttgggaatccctgatgtagtccaactgttcacagcgcgcaggaaactcttctgtagcacttctgaaaggcggccttgaggcaggctttgcttgaatacttaattggaagccttaactgtaccttggagcacttactgagggccaactgaccctaagaaaggattgtttacaatggaaagtaccttatcagtgactagaacacatctgaccaaggcatctgttaatcagtagttccctgccaattgaatctgtgcacaaatacaacactgttattgttttgggaaagtgaaaaaaataatagttgtcctacttgttggctttcatgtcattaaatttttttttgttttttaatgaaagcttttttgttttgtttttacaaaagcaatgcttactcactgcagaaaataaacatgcaaaaagaagcacataaaagaacccatcagctcatctgctagtttgccatttattgatcaggactaactagattcttcctcttggaaaatttccaagattgattccctccgcctccaagttcagagcaggatttggaaaagtaaatattaataatgtacctagatctgatttttaagaggttccaggatgaaatagaaaccatttttctatacagctgcattttctgatggctcttggttcagtgtggagcccaaagtcctcccatatagctttttctgtcaagaatttagcagttgcttggtgggttttgcacaagttacttttctatatcaaaatggataccaataataggtttttgaaaacttaataaatatttgtaaagtacctaatatgtagctaaatcaataaatatttgtaaagtacctactatgtagctagaactgtgcctgggtactgtacggagtgccaatgaaggaggacctgtcctaaatttatagtcttattagcattagtgctctagctgtgccagtttgactttgtaactttataactctatcccagcttcacccataaccttttaaaaacagcagctttagaataagtacagaaaaggattcttagaggctatatattggtctttttcatagagattaaattatgctggtgtttatttggatgaattgtaactgaccagacaactttccgaagagaagctatatgatttagaggtgttataaagtggatagtgggtgaaaatcctttctttatataattgcctaattatggtccttttgtgatatcatagatttcaggattcttctgtggttattgattcttataactagcttgacttctgttttttggtttgtttgtttgtttttttagggttcagaattttttttttttaggtttgaggcttttctgggtgggaaaaacctcacagaaatattcttagtgtatgttactggtaggagcctctcccttccacacgtttactgaatgcctattgtgtcccagccactatattaggtgaaagggacagaggaatggataagacagatgaggttcctgctctcatggagcttacattttaatgggagaagaaagctcaacagataaataatataatgtcagatagtgataaacactatgaagaggccgggcatggtggctcacgcctgtaatcccagcactttgggaggtcaaggtgggcaaatcacctgaggtcaggagttcgagaccagcctagccaacatggtgaaaccccatctctactaaaaatacaagggcatggtggccagcacctgtagtcccagctactcgggaggctgaggcaggagaattgcttgaatccaggaggtggaagttgcagtgagccgagatcatgccactgtcctccagcctgggggacaagagcaaaactctgtctcaaaacaaaacaaaacaaaaacactatgaagaaaattacacaggtaatgagaaaggagaatgagtagatgataggaatgggtgatggtggatgatccttctttatattatgtggtcagagggccttccgttatcgggtgacatttgggcagagacctgggtgttggcaggaggccagccatgtgaccatctggggaaataggaataaatcttatcatttgcaaaatcttaggttactagcctattttccacgcttttttgtttccccctagttttagtcaagtctctcctatggtagcagtctctaagagcagagacgatcttatgtactgttacttcccattgcctacctagcatagggtctggtacatggttaacccgtagtgaatttttgttgaagatattcattggtgggcactagggatatggtggtaaactagactcatttagtctcctttttcttccatgaattttaaatgatgttttgcaagaagttcttttggattgaaaacttcaagatcagtgctaagcagtacggataattatacagtaatttactaatgtataatcccatataataatgctagtttcttacctgtactccttcagatatacctccgtagtctcgaagggggtaatatggagaattaggagttccttggtgaggagagttaggttttcacaaagttaggttttctctgagagaaaacaagcactaagatttttctataggcttaacacatttcatttaactgataactttgatttcgaggttctgccaaattattctagttataatagagatactgtaaaggactgaaaaattctgaaccctaaaaaaaaacaaaaaaaaaacgaaaaacagaagtcaagctagaagataagaaaggacaggcttgttagtttgttagtcattgattatcacatctgatagggttatagatattcaaatatgtcccaaataccagattagtttgttagtcattgattatcatatctgatagggttatagatattcaaatatgtcccaaatatcagattgtcacatctgatagggttatagatactcaaatatgtcccaaaagaacagctttcttcccctatatctttgggtagattttgtctataaccaagcattatttcgtagcactggagctgatttaaatgacccttgatgcaggaaggctgctcttctttctgtagtgcaaaagtattctgatcataatttcttattaaagtgatcagagatcccctcagacccaaaagtatactttataagtacttgttggtatcctgctgtgcattgtgaaagaattctggaggtgtgccaaacactgctcaacaataagcactttccattagttgagtagtgttgaatcttgtttccttacccactctttggccttaacaaattaagtcattttatagcttaaaaacatatttttattaacttttaatactctttttcatgtgttcaacattcttactttaaaatcatattgcttttctcctttaagaaacttaccaaaagcaagggtataaagtaactgaatgcaatgagtgtacctattattaggaattataaaggagaaacagttaatctgacttaaacttgtaggaaaaccatcactctgaatagaaaacaaagataaataggtaccgtatgcctctgtgtcctgtattttaaaaagaccttttgctcaacatcattctaaattcatgagtttgaggacaagagtccagaatttaatatgatgaaagtaaacataaagctaaaacttgggaaggttccctttaggtgctgtgtttactaaaaaggagacttgtaaattggtatctaacttgtttggcaaatttcttttagctctgaagggtttatatgctttcaaagaacctattggagaaatatgcactataattctaaacaagggtaacttgcccaaagtctcacagctaggaagttggactgccagatttgagttctagctcttccactccaggaatggggactcttaatcacttcattatataatcaatccattgtatcttggatcattgtttggtttctttttattggttttgttttattgctagcattatgttcttcccccacccctaattttgtgtgtttatgttttcagctatactttgggtcaaatagacttgcaaaaacctagccactttttgcagtgtcatacacttggggaagtaaggtctgtgttctctgtgagaggtttttttttttttttttgacagggtcttgttccattcccccagctggagtgcagtggagtgatcttggctcactgcaacctctgcctcatgggctcaagcgatcctcccatgtcagcctcccgagtagttgagaccacaggcatgcaccatcacacccagctattcttttgtatttttagtatagatggggtcttgccatgttgcccaggctggtcttgaactcttgagctcaagtgatctgccccccttggcctcccaaagtgctaggattactggtgtgagccactgcccggtcaaggtctgcattctaaaagaatttacaaatgacctttttggaaaac

SEQ ID NO: 138795 - DNA, 1051 bp, Homo sapiens
aaggcaaaactaacagtggaaaacagatcagtaattagcatgggtgggggtgagaggagggatatataaaggggtactaagagggaatttgaggcatgatgaaactctttggcatcttaattgtagtagtgtttacacagctctgcatttgtcaaaactcagagctgtacaacaaaaatgaattatactgtatataaattaaaatatatatttttaggctgactcaaaaagaattagaatgtccaacatccaaaccagtagaagggggaaacatgatcagtgaaacagggaaagaaggaaagaagcctagaaaaagtaaagttaatacaaagcacaaaaataacattggagagatagttccaatataactaatcaaaaggccgcatacaaatcagaaagacaacttacagtctgggagaagacattcatagtgcatataaccaacacaggattaatattcagaaaatataagtaggtttcataagtcaataagaaaaacaggtaagttcaaaaacgagcaaagaatatgaataggggattcacagaaaaggaaacccgaatgaccaatacattaataagatcaatctcactatggtcagaggaatgcagaataaaactgtaaggtattgtacttcacatgcatcagattaccaaaaatggaaaagccttacagcattaaatgatggcgtgatgaggaatgtagtctcatttatggtaggaatataaatgggcacaactactttgaaaagcaatagtaatatttagtaagatcaaagctgctgacatcttatgactgagtaattctaatcttaggatatacatctcacactatgtttgaaaagaaatctacaagaatgtttatttctgtattgtctgtagtgagtattaaaaaaatggaaacaagctatgagtgttcaacagaatggatgaattgtgttacatttataaaatacagtgttatataacagttgaatgaattagtactatatgtgtcaacacagataaatgtctaaaacaatggcgtgcaaaaaagcacgggaaaatacatcca

SEQ ID NO: 138796 - DNA, 1087 bp, Homo sapiens
ggtattgaagtcttcaaccattattgtagaactgtctatttctgccttcaattctaccagtttttacttcatatatagtgggactgttaggtatgtctgtttatgattattaataccttacccctatatcaatatatattattgttgtctcttgtaataatacacttttttacttaaaagtctattttatctgacattagtggagcaaccctagccctcttttggtttggtttgcttgcaatgtctttttccatcctttctctttcaacttgtttgtgtctagaacctaaagtgagtttcttgtcgacaatttatagttagatcttggttttaaatccattctgccaatctctgacttttgaaattggagagtttaatttttttacatctaaaataattactgatgaggaaggacttctgtcattttgctatttgttttctatgtatcatattttttttgttccttaatcctttattactgccgtctcttgtgtgtgtttctttttaaattcatgggttttttgttcactgctgtacttgatatatatgaagtaacaaatactgcatttttacttatatatttattcttggttgaattaattttataatcataaacatctagtagaaataacataagcttactcgactagtaaactcagaataaaagttgtgtgtctgcattatatttaatgctgatgctgacaactctgaaggcattttcttttcttttttttttttttaactaaaccaacagtattatttaccaaagattaccagtcaagtgaacttgaaaagcatttgggttagttcttctgttttctaagagaatacttaatttatgtaagtttctctttctgtccttttttttttttcttgagacagtcttgctctgtcgcccaggctggagtgcaatggcgctatcttggttcactgcaacctccgcctcctgggctcaagcaattctcctgcctcagcctcccgagtagctgtgatcataggcacatgccaccatacctggctaatatttgtattttttgtagagatggggtttcgccatgttgcccagcctggtcttgaactcctgagc

SEQ ID NO: 138797 - DNA, 1029 bp, Homo sapiens
ctagagtgctatgatacagtcatggctcactacagcctctacctcctgggctccagcaatcctcccacctcagcctcccaagtagctaggactacaggcacctgccaccacacctggctaattaacatttttttaatagagacaggggtctcactgtgttgcccagactggtctcgaactcctggcctcaattgatctgccgtcttggcctcccaaattgctgggactacaggagtgagccactgcccggccggaagttttctttcattcttagctttctgaatgtttttgtcattaaagggtgttgaactttgtcagatgctttttctgcatcaattgagatgatcatgtggtttatttccttcattctattcatgtggtgtaatacattgatttgttttcatatgtagaatcacccttgcattcttggcataaatcccatttggtcatgttgtctaatccttttggtatgttgttggatttgatttgctattattttttgaagatctttgcatctatattcataaggaatattgatctgtactattcttgcagtatctttatccagctttagtatcggagtaatgctagtgttatacaatgaactatcaagtatttggtcttctgttttttggaagactttcagaaggattggtgttcattcttctttaacagaattcaccagtgtgaaagtcagaggatgatgaaaaaaaaaagagaattcactagtgaagctgtctggtaccaggcttttcttttgggggatgttttcgattatttagtatcctacaggtctgttcagattttctatttctttttgcatcagttttaggtcatttgtatatttctaggaatttgtatttttttgtttgtttgtttttttcgtgtctttttttttttttttgagatggagtttcgctcttttcgcccaggctggagtgcagtggtgtgatctcggctcactgcaacctctgcctcctgggtttaagagattctccttcctcagcctccagagtagctgggactata

SEQ ID NO: 138798 - DNA, 1058 bp, Homo sapiens
gaagcccacttgatcatggtggataaactttttgatgtgctgctagattcggtttgccagtattttattgaggatttttgcatcgatgttcacatggccgggtacccctctgagacgaagcttctagaggaacgatcaggcagcaacatttgctgttcagcaatattcgctgttctgcagcctccgctgctgatacccaggcaaacagggtctggagtggacctccagcaaactccaacagacctgcagcttagggtcctgactgttagaaggaaaactaacaaacagaaaggacgtccatgccaaaaccccatctgtatgtcaccatcatcaaagaccaaaggtagataaaaccacagagatggggtttatttcttaattctattccattcttcttatatgtccgtcttacactggtgctacactgttttgattactatagctttttggtaaattttgaaatcagaaaatgtgaatgtttcacctttcctctttttcaagattgttttaactatttaggtgccttacatataattccatatggattttaggatcagctttttcatttctgcaaaaaaggccattgggattttgatagggattgcattgaatctatatatcactttggggagtattgtcatcttaacaatatgaagtcttctaatccatgaacaaaagatgtctttctgtttttaggtatttaaaatttttttttcagtaaagttttatatatgtcagtgtacttttcttgtctctccctaattatgttcctaaatattttgttctttttggtgctatcataaatgtaattgttttctaaatttacttttcatgctattcattgccagtgtatacaactgtatacagctgatttttgcatgtttatcttgtatctggcatttttgctggattcgtttgctagctcttatgaatttttgtggatttttaaggagtttctatttatagcatctttgccatctacagtttacttcttcctttccattttgggtgccttcaatttcttgcctaatttctctgagtggagatttcaacaatgt

SEQ ID NO: 138799 - DNA, 3153 bp, Homo sapiens
tcacctgaggtcaggagttcaagaccagcctggccaatatggtgacaccccatctctaccaaaaatacaaaaattagccaggcgtggtggcttgtgtctagtcccagctactcgggaagctgaggcagaagaatcacttgaacccaggaggtggaggttgcagtgagccaaagtggtgccactgcagtccagcctgggtgacagagcgagactccgtctcaaaaaaaaaaaaaaagaatcttcaacgtgtataaaacattttttaacctggtttattttcatgatacttttctctaaaaaagagatttaaataaataaaaattttaaaaaaggagattaaattcatgagccgaaactgttgtctttttaatggggtattaactaaatgggcttgagccaatgataatgaactttacattgaaaatttgccttctcttacagcctgctgatcttaagaagagaatagaatctttaattgaccgggactacatggaaagagataaagaaaatccaaaccagtacaactatattgcatagaatgttggccttgcagcatttggtgtcatatgcagtagccagtggataaactaacctgttgattcaatattatttgactccttttttactaccgatgaccaaatgaagcagtgtaattaatggaaatagttgagtggactttttctcagtggttaacatgcccattttaaagagtaatacttacctttaagaagaatgttgttgaactctttgcatgttatttagtatgatgtgcagaaaacacttaagaacgtacctggtcttcatgaattcctctttggaactgggaaagagatccctgtggctattaaaaaggggggagggttcttacacaccattaattatgaagcaaaaggtttatttgcttaaaatgtcatttaaagatacttaaactgcatgcaaactttatttactgtacagagttctggatgtatttatcaaatagaaaaaccacccttgacttggttgttcacccgttttgtgatttcccttgaaaagagaaatgaattgtcatagctattgatattttactaggtgatgttctgttacactgaaagggatgttttttaaaaaaaattatttggaaacaagttttcaagtagggggacagttgcttacataatatcttgtatattcacatcctaaaaattttcatttatgagtatgggatgtgtgtatatggcttagccccaagttaactgtgctgattaacaagtacttataaaaatagctaaagtagaaaattaatgatcagttgtactagaggaacatcatagaagagaaaaatccaactctttatattaaaaatgaatacaataagaaaattgcaaaagagaccaaaatgaacgtgttttgtaaattgttacaggagcaaaaactttgcaactagttttcaacatactttagactttaaatgttgtttggacagttttgtcttcaacttggaccaattgtagattgttacaggcttcctaggatttagcattcctattttctctaccaaagttttttttagaagcatcccaactcttctctttgttgataaataagcctttcctgtcatcttcattttaacttgctaaaaccctagatacaaaggtcctccctcatttttcccacagagcccctgtttgggaatttgagattctgtgtcatgctggttttcctttcagaattgcttgaaatcgagttctcttagccactggacacctagttttcaggagaatgtcccaagattgtttatatatacaaaatggcaaaagtactgtttttcgaattgataattcaagcaaaggcttctctttactgtcactgatttttttttgtttttattttgtttccttgtttctatttccttgaagctttgaagggaggagaagcagaaaattttgtttatgtttgttaaaaatcagaactacttaatgctttttgccacagcatatttccttgcctgttggagccgttaggaagattacctatgtcctaatcttcaacctgagaagatttttgactcttgtgtctactgttgattgtttgcttgagttctcaaagacctgtggccaggtattttaaaaagtcgtctatttctttctagttgcatcaacttgcacactggtgtctaactatatgtggtattcggaacttgtaattcttattgagcagccattgcctatattttctcagctcctcactgatttctttatatgagctcagctgacaagcaaatgcagctattttgtttaccctctcttcataccggaccatcaacaacagtgttctaactcatccctgatggtctgtgagatgtagactattacacaagattcaagttactcgtaagcaacttttagatagagttggtcctgttaggaggagactcttgatgtcaccttcagtatcttgaaagcgggtcccctccccgaggctcttaattctttgaaaacttgatgctgtttcagctgaaaaattagcaagactgttaaaaaaaaaaagttgaggggagctgtttaagaaactgaaaagtaattgcaaactacattggataattgtgactttcagttgttgttctgtatcagttgaatttttgtgctcttttccctgtgtacgtggtggttctatttttctccaataaaacttttatttaaaaaaagtttctagagaagatctttaaaattcaagtattgtaagaaagttataaaatcacaggacttaaaatcttcctaacaacttctaatgaactcacatttgttgattttgttatttttaaactttttaaaaattttgtaatggttttgtggtaatgctataagagtatgggggagggcatggttaacagggtgaggaaaattcccaggaatcctcaaggtggataattattcttaaacatgcggatacaagtataaacattgcttcattcaaatcctcagtgtcaaattgtttcataaagtcaatatgaaatgagtctagatttgagttcaggggagaagaaaagattactcttagttatggcatttgctctgccttttctgttaatagttttttgagttctgggccagatactctcagagtaagatgttcctcaaagtttttgaacccagttcctgagtctgcttgaat

SEQ ID NO: 138800 - DNA, 2186 bp, Homo sapiens
tgatttatatattacaaaataaaaattaattttcaaagaggttgactcttaactagtttgcttagccagttaataccatgccttgagtcagagatcagacagagtcaccttatagacaagctattgtcatagagaaatctggttaacaatccattgaaactgatacacacatttagaagatatatcaaagacagagtaaaaaaacaaaatggtaaattccacatcagctatctctacttctagaaaagcaattcaaagatgatgtttttctattaactaatattagcattacttcattggtatagggcaatataatcagaacagaaaggagttatgtttgtaggatttttctctgtcagcatctatatttataagaccccatttagataattcagtacctttaaagcaataacaatgtcatgtccctaaaatgcacaatttatgtaaatagtcaggttttgcttctggtataattcctaggtttaaaacttttttgttaggttgaagaacaagcaagcactacagaaagagtatttcaagacagacagtatcaaattgatgctgcaattgttcgaattatgaagatgagaaagacacttagccacaatctccttgtttcagaagtgtacaaccagttgaaatttccagtaaaggtaggtacttctgtgttttcctattgagcgtgttataaataaaagaaagtacattagattttcagacacaaatcttgcaaacataaagcgtcatgaccatttagagagagaaaagttttaatttcccatgttgatgcatatgatttccaaaaaaaaaaactttgttggcatatgtgggcagcagtgacaaaagggaaaaataacagaaaagcctggatacctgaaagtttaactgctaaatgagtgtttgaaattttcaagtttattcactatatttcttttgaacttcttggttggttatttacttcttttcctcttgaaataccatggtatttattgaaataccatggtatttgacagatttagttattgtggattgagttaaatctcctgtttagttagcttatataagagatcatctgttaaaaaccatacagataactagtcatgattaagcatctttttgaaaagtgtagtgatagttctggtaaactgaaattggtcattaaatggaaacgttccattgtgaatgaccaataataaagtcacttaatgtgatgttgtactggccttttttccaagttttaggaggtagatagccaaacccttggatgataaacattgatagagtttgaatagactgctagctattagggttcttatgagctttggactttcataaatcacttcaccatgctgatcttgtttcctcttttgtaaaactgagataataatagtacttaccttgtaggattattgtgaggtttaagtgagatcatgaatgtaaaaatcttagcactggacctggtacataataagcactcggtagctcttagttctaataaggtaagcattttcttttctccaaacctaatatcgcactcctcattaccaccctctcaccctcatgctctgcttaatagtcatttcacctcaagccagagagatcactgatgctggggaaattaggggatcgctgtagttaatattgtgctgatattctaggtctttcaccataattaagagaagtcatctgatttcccaaccttgggattactggataaaattttcactgctgtatcagactacttcccctcttttcccctcttgaacaagtggtcattttacttatcctgaaaaactttctattagcaaacaagattatattatatttacagactagatacataagatatatagtggaattttgtcatccaggagcttagaatgcaatcatgaagataaagctacaagctttcttgattacttttaaatcacaggatgcagaaatccaagtcacttagatgcactaaaccagaaatatgaagatctaaattatgaggtacttcatttatcaagccatttcatgtagtttttttttgagatggagtctcgctctgtcatccaggctggagtgcagtggcatgatcttggctcactgcagcgtctgcctcccgggttcaagcaattcttttgcctcagcctctcgagtagctgggaccacaggtgcgcacaatcacgcctggctaattt

SEQ ID NO: 138801 - DNA, 1173 bp, Homo sapiens
caccactgacaattggaaagaggacacagttatatggagatgatgaatcaaattttggacgtaactacagttgatagtaaaacagccaggcggaattgccctttaaacgtgcaactggagagaagtgaaatgtcattttggaatatttggtagttgcccacatggtatgataattgacgtctttaaaagaggactaggggccgggcgtggtggctcacatctgtaatcccagcactttgggaggccaaggcgggtggatcacttgagctcaggagtttgagaccagcctgggcaacatggtgaaaccccgcctctattttttttaaaaaagaagaggactaggaaaaaagccattggctagaacaaagaaaagttgttggtgacctttgggaaaaaatgaaatagttttaatagggggatggagtggaagctagattgaggtagaatgtcgtagttgttcatgctggtaacaaataactaaacctctgtttcttcttcagaggatggagagttaaggagaacactgcagtcattagcctgtggcaaagctagagttctggcgaaaaatccaaagggcaaagacattgaagatggtgacaagttcatttgtaatgatgatttcaaacataaacttttcaggataaagatcaatcaaatccagatgaaagaaacggtatttctttcactttctcttagtcctaacacactggaattatacatgttaataatcaaaatatataaagatttttatacctgtaatactgccaataccattaatattttttgtgtctatgtccagctaaatatgtttcctgatttgattttgggtgtttgggagagtggttgtacaggattgagatgatactcaacatagtttcatatcttactttgtttatttagtattcaatctttagaatttttccatgccattaaatagcttcgaaaaatggcagatggcagtgtaatatttttacatggctcttatagtttgttcaaccactgttcattttggggcaattaaattcatgacttattagtattataaataagattgcaagaaacctctttgaaactaaattttaatctctgatatatgataaatttgtggaagtagatttttttgggttaaagggtatgaacattttaggagtcttagtacataatgtcatattg

SEQ ID NO: 138802 - DNA, 2787 bp, Homo sapiens
cgcctcagccttccgaagtgctgggattacaggtgtaagtcaccaggcttggcatggatacttttaaaagtgtatgtcagtaagcgcaccaacaccaaataccaactgctttaatgttttacttttgtacttagaagtccagttaagcacatagctaataatgccaaatttctgggttcagggtcaatttccctggctcttcttccatcttcccaggttatacccctcactctacctagctattaagaattcttgcacatatttcacccataggtgggattgctaaatgatgggtccttgattaaatctatcctgactcctggtaaactgtctagtccaggactgaagcccataaaagggattaaggctagacagatagatattgagaatcctccatggagatgattatgaaggcccagggagtagatttctctcaaagaggaagaaaaaacagcagaggcagaactttagaaaaggctcacatttggcagatggtagaaagaggaacctgtgaaggaaaccaatgcagaagcaacagtgaaataaaggaagcagcatagtgcagaggcacaaaagctgctgcaggtgaatgtttcaaaagaggggatgattaaatgttcagagagagcaaaaggtataaatcctaataaatcccatttgatttggtggttgggagatcattgtttttcatcaaagtgattggtggacctactggatatagtcttaaaattttccagaaactatatcacatgaggtaagtataaaaatggtaaatgtggtattggatacagagcttaaataaagccttattttatttactttagatggtaaaacttcaggagattttcaagacattttacctaggcaaacatagtggcaggaaacttcagtggcagtcaaccctaggacactgtgtgttaaaagcagaatttaaagaggtaagtggatgttcccaaaacttttagttttcatctttatctttaatgtttaggtcatccttcttaactgaaagtttaggctattgttttttgttttcttcttttttttttttttttttttttttgagacagagtctcactctgtcaccagagtggagtgcagtggcgctatcttggctcaccgcaacctctgcctcctgggttcaggtgattctcctgcctcagcctcccgagtggctgggactacaggcgtgcgccaccatacccagctaattttttttgtatttttagtggagacggggtttcaccatgttggccaggatggtctctgtctcttgaccttgtgatccacgcgcctcggcctcctaaagtgctgggattacaggtgtgaaccaccgcatctggccagtttaagctgttgttttataattgtatcctagatatccgcatgatgacagtgatagtttgtcatagctttatgtatttttaagtaattttaggtgtgtggtctttccacgattgatttggcccttctgcaaaatgaaaagcagtgaactttccccctaccctttcctcacctgtggatgaaaactgtacactgccacttcctatttttatttatttgtttatttttagagatagggtcccactctgtcacccaggcaggagtacagtggcacaatcatagttcactgtaacctcaaactcatgggctcaagctatccccctgcctccgcttcctaaagtgctgggattacaggcatgagcaactacacttagtctaacactgccacttcttgacagaaatcttgttgctgggagctacgaatagagtgggagttaagggaaacagtgtgcaatatctaatctcaaaaaactttagcttttcatgactaatctgagccaaacaaatcaaaaatacatttgaaatagtgatttcttgctgcttgtgatgaatatctagaatgacacataaggctgattaattttcattactgtattctatttataaggcttaaaaaaaaactgttaaaaggtcagctaatccttccccctattttaggtagggtcacacctaaacctcacactgaaatactgtattaccacgtcaagtggctttgctggataatgctaatcatgtttctaaatccactaattgaaaaatgcttttcctataagagatgattaatttttcatgtgtttttaaaaaagtgatgactaaacacttttatttcttcaacagggtaaaaaggaactccaggtctctctttttcaaacactggtgctgctaatgtttaatgagggagaggagttcagtttagaagagatcaagcaggcaactggaataggtttgtagcaaacattaattgttcactatgtgcacaccactatgttaagaggtctgggggacatatttataggaataattccttgcctcagaactgttttgagttttttttttctttttttttaatgagacagggtctcactctgtcacccaggctggggtccagtggtacaatcatggctcaggctcaagtgattctcctgcctcagcctgccaagcagatgggactacaagtgcatgccaccgtgcctggctaatttttaaaatttttttttgtagagacagggtctcactatgttgcttagcctggtctcaaactcctgggctcaaggggtcttcctgcctcagcctccctaagtactgcaattacaggcatgagcccctgcagccagccagaactctttttttttcccctcaagacggaatcttgctctgtcacccaggctggagtgcagtggcgcgatctcggctcactgcaacctctgcctcctgtgttcaagc

SEQ ID NO: 138803 - DNA, 1530 bp, Homo sapiens
tcggaaagagtgcatctgtagatgctgaaaaatcaatgctgtccaaacttaaacatggtaggtttctcattctttctgttccttttctttgattcctgaaggagaatgttagctttttaccctttcaatcgatttcctcttttgtcactcatgtctatgtatatatgatgaaaacataaattgagcaagctcctgaggtttccaacttattgtacataatatccagagttgttttttttaagataaagcattgttcttggttttattatttgtataaaaatttcccatttattttatacctaaatagtagataaggttactacaggattaaagagtttgactctgaattaatggggcatacactttggggtaaggatttctttttattcttatgaaagttacagatcatacttcatactaaagttttgtatttcgtgtttcccacttttaaacctcttttgtttttaccactttaaaatattatacatgtacaaacatctttaatagaatgcggagctgctttcaccagcaaacttgaaggaatgtttaaagacatggaactttctaaagacatcatgattcagttcaaacaggtaaaagtgagttaaactcttaattcctcaaacttagttgtatttagttatctgcttgctatgatttgtactaaagaggataaatagaaacgtgtttgttgtaattcatggcaactgaggtgatattcacagtagaaaaaaaaattggtgaaatataagtatatttgacctactttaggatttatttttgacaaacacccagaataacacaaaaataaaaataaaatgtattgaactgaagtcagtacaagaagagctatagtgggaaaagggctttcctcagcatcttatcgtttggtaatttgcatgttcagagcttgcaatggggagagaggagaagtgataatgcagctgtataaaagcctttggggacattggggatagaaagctagatccacagttttgaagatgtaggtagaaagtagttttgaaatgtttaagatcataggtgataatgatggcaaattagattttcctcttttgggttttagtagtgacttctttaccccacagtgttgctaaggtgggaagtggaagtgaaagaattaagaaaaaatcagggtcagtaagattatggattctatagtagctacagaatagggcttatctgctttgcccttttcccctctttttccttccctactccaggtcactccctgcagacaggcagtggagcaagtgaaaaactggagacttgggctggctggggggtgaggaatgggggttgctgcaaggtgtttaagccacataggggtattcaaaggtggggactgcaggtggtattggggaaaagaatggagaagagatcctataacggcccagctgtatgtgagaaattatttaagttgataacgcctgtaatgaggtcatgtgatccttgtatgcctttgtatcaaaatgttaacctctgtacttgcctagtgcattttgtgtaggt

SEQ ID NO: 138804 - DNA, 2234 bp, Homo sapiens
aaagccagattgccattttaaggaagttgaaagctgacttctttaaaaataaggaaaagatcccagaggcttctaataataccctgttatgatatcatatgcccagtgatcattgcttactatttttgtgattatagatgagtggttaacagtgtggatatttagcactttatttttttgtcctcatttcactatcagctttattttgccaggtgcagtggtacatgcctgtaactccagctacttgggaggctgaggcaggaggatcctttcagcctaggagtttcagactagcctgggcaacatagcaagattccatcttaaaaatagctttatcttactttttaaagatctttaaatatatatgccacttaaaatatgatttggggattgttttcattgtagacaattcgattacagtaaaaagtggtaattttttgttttaggcatttggcagcactattgtaattaatcctgaaaaagataaaaccatggttcaagaattgctggattttaaagataaggttgaccatataattgatatctgctttctgaagaatgagaaatttatcaatgccatgaaagaagcatttgaaacgttcattaacaaaagaccaaataaaccagctgaacttataggtatgttttccagtcctttttccagttgtttaatgatgttctttgagtcataaaatctcaatctgaaatttttaccaggttgtagtattactaattcctgatttgtttgaggttgcttagctggtatatcaagtttgaagagtgtttctaaaaacctggatgtaagtactgaaagcccacatgtcaaacataatgtgctttctttcaaagacagtacgttggacactatttacctttattgataataagctaatctgttttcctagcctaatgatttaaaaatgaggcagggtgttatttcaagctacaaaaaagggcagcatgaaattacagttgtcagtgaaaaagaaaaaagtccagggcaaaaataaacctaataatctgggcccatttagcataaggatgtgatatacactacagtgcttctcaggtttttccacccaagtacccttagtgtcagaggaggaggtaacctgagaaggtctagggtcctctgccaaaaggatgaaattttgttgcaacctatctactatgtatccgtaaacatgtagcaaattttaccttctactctacgatgtatctggtttattttaatagaaaagtaatgtttaagattgcttactattcctataaaatggatactccagaagattcctcatgtcttttcgtggcttggattacatgatgccctcacagggctacatgagacctcccccacaggatatccgtatcctattttcataaacatcagtatagtgggaagtacatttgatctggagtcagaacacttgggtttgtgttcaggccctgatgttattagctctatggcactgaacaagtcagttgatcttcctgactttggagacttttaaaaatgcatataaatttctgaagtattgaaaaactcagtgtatcatactcctctttgggtatatatagtgcccagtacctcgtgtattccccggttattaaacaacaaacttttcccccattttagctaagtatgtagattcaaaacttcgtgcaggcaacaaagaagctacagatgaagaacttgagaaaatgttggataaaattatgatcatatttagatttatctatggtaagtatttactaatgttttaatatttttcttttaaaatagcactcaacagagaagctagcaagtatattcaaactggagggaatatttatttggaaattacagatttaaaattgtgtttaattcattggggggatacgtgaggaatgttacctgattgtcctatgctttggctcttctagtattaagtgccttgatttttgctacttggcttaatctcttaaatattggcaccaaagctaccagtccacaaaagcttttctgaagaaaagttaatgcaatcaagacagttacatgcaaaaaagttttacaataaagacttcgaaatgtctggcacaaaaatggatctctactgtttcttgcatttaacaaacttaaataaaatgtgtaaagtaaaataacttggaataatggtgtgctttattaaagcactttaaagcagttttgtcagtactttttattggaatattataaattttgcatttctttttac

SEQ ID NO: 138805 - DNA, 1072 bp, Homo sapiens
tatgtaagccagtttttataagtttgtttttgcctctaatctatcatgctaaatggcacaaaccattatggagttaaccatttttctttttctttttaatttttttaactttttgaattaaaatagagagggggagggggtcttactgttgtgcccaggctggtcttgacctcctggcttcaattgatcctcctgcctcagcctcccaaagtgctgggattacaggtgtgagccaccgtgcctggcctgtttttatttttatagcgactaaagtctctatatttagtttttacccagaaagatggttgggtttaattcaaaggaaatcttacattacaactcacatacagactagtcatagttcaaaccagtatcacaataatgattataactcaaattttattaaaatgtctgataatcttgttcacttttttgttcactatattttaatgccaaaatgttttaaaatacaggtttaaataacctccttgatgaaaaccgaattcaagatttgtctcttctgtatcagctcttcagtagagttcgaggtggagttcaggttcttttgcagcagtggatcgaatatatcaaggtattaacaatttacctgtgatttttctctcttatggcttatctacacatcaagagtgcatattggcaagcatttcttgtttgatccaatttttttttttttgagacagagttttgctctcgtcacccaggctggagtgcggtggcacgatcttagctcgctgcaacctctgcctcccaggttcaagtgattctcctgcctcagcctcccaagtagctaggattacaggcatgcaccaccatgcctggctaattttgtatttttagtagagacggggtttcaccatgttggtcaggctggccttgaactcctgaactcaaatgatccacccgccttggcctcccaaagtgctgggattacaggcgtgagccaccacacccggacttgatccagttcttttaagggaattttaaatttgtttaaaaagtaatgggaattttgagaacagtcaacctgagaatggtagctgtgtggcatatc

SEQ ID NO: 138806 - DNA, 4489 bp, Homo sapiens
actcaaatgttaatctcttttggcaacaccctcacagacacacccaggatcaatactttgtatccttcaatccaatcaagttgacactcagtagtaaccatcacagttgcctaggctgttctagcctggcatcaagcaatcctctcaccttggccccccaaaatgttgggattacaggcatgaaccactgtacccagcccaagtaggattttctttgagcagcatgttggcactcaaaaagtttcagatttttgagctttttggatttcagatttttagattaaagatgctaaacctgtaatttgttcttttttgatacagtgcattggttatgagaaagtttgccacccacattgatatattttgttgttttaccttgtgtcttaagtggatgaataaccctttttaataagctgatgtggtagaaatatcaaattaataagaatctgatgtaaatagttgagaaatccttcatcctctccttaagaaagtattttaaccttgcaggctgtagaaaatctctgttcttacaagatttctgcaaacttgtacaaacagctgagacagatctgcgaagatcacatcaaagcacagattcatcaattcagagaatatcctttttaaaacaaaaaatcgtgaatagttttgtcttcctctctgtccctacccctcactgtttaacccagcttgaagtagaatgcctgtattttgtaggtttgtcattttttgtgccttgtgtttctcgagaaagaaacacattttgacttttcagccttaattcgtgtccaggactacgtgtggtattcatgtaaataagatgtccttatgtctttatcctttttgccctatcagatttccacttgaggaaaaataatctcctaagggaaatagtaaactgaaaacacgatgttcagttatgtctaagacttgtttttaaaggtgttttttagtataaactatgttttttttttcttttacaaattaggaaatagcactttggtgcataatcaagtgccatttagtttcacttagtgtgcaaggtattcatgtttaagactaatatgctctctgtcacatggcacatatgacttgtaccaaacgctttaaaatatccttaacatatgtttcagggattcattggatagcgttctttttttaaagaagattgatagatgctggcaaaaccattgcagacaaatggtaagctggaaaaagtattgtatttcggctaaacattgtattaatagttaaaaacatttcttcaaatacaggaatgttagtttttaaaacttagcaatagggagattgcttcaatatctattccttttctttttttttctttttttaaaaatttatttattttttattttcccgtaagttattggggtacaggtgacatttggttacatgagtaagttccttagtggtgatttgtaagattttggtgcacccttcaccagagcagtatacattgcaccattgtagtcttttatccctcgcccccctcccactcttcctcccaagttccttttctgaattggaaactagttttggttgagttttctattttaaaaccacaagttacaggtaaacctgcatttcagaatgtcttgcaccttaggttcatttttatttttgtcacacttaccaaaaatgtatttatctcattcattaaaaagctacatttcgtctgtcactcttatttttttttctctcttgatgattatcctgtccactatttgattacctgtgaaggtgcctgatggtcctgtgttttagtttattcagataacaaccttttccatttttcttaatctggtttataccttatattctacagattaaaatcttaaaatccatcacccctccccacccccaccccctgccaataaaaaccctcacatgtgcaatgtaaggcagcttcattccctagcactgtggcgcaggaagaattatatgagcgtccccttgatttttcagttacttctcaagcagtaaatcagagggccattttaagtgtcttttttctagaaaacacaaaaaggattgactgttgagtaataaaaactatatgggcatattctcagatagatgtgtttatctgcatgtttgatcttagtaatgtaatatatatacagacaaactcttcagttttattcttattgaaagcaaatatttcagcttcacaacatacaaaacttgtttgatttctttttttttcattggcagatcatgatcaggagcatttttttgtttctggatagaacttacgttcttcagaattcaatgctaccctccatttggtaaggatgccagaaaaatatgaaaagattgttccaaatcatactcaaatcttaattacactaatgaaagtgtataagctatactgtgaatattctaaaaattcacatttggttctagactttcctttgtagcagttttatcttcctaataatatgttgcctatgctaatattgaagatagctaacattccctgggcatatattaatttatgaagaagttttttgttagccgaggggactaaagtttgctctggaatgtctatgattgtgattcattttgctgctgaccatcaagagttcactcatttaacattatgcaaaagtccatgtatacacgaaaatagaatagtatcatgaactcttccccctcccatgtacctatcatctgcctacagcaatgatcagaattcactgattcttcagtattgaaaccagttgataaataaccaaataagctttcaataccagtacagtgaaaactgttttatgtcttagaactaattttgtctgttgatttgagcaaagaagaaatccacaaaaagaaataatacaacaaaacttagttatggaggaaaataggaatttagcttcaattctcagtaaaggcaaaatgagtttcctgtgttctttaatctaataatgttattcaaaattaaatgtgtggattttattttttgacaattgctgcttcaaagccctggagccctaattagcatgggaacatgtggtaagaagttaagcaaacctcttcagaagtggtattgtcaattaatttaggttatatgtgttttttattttagggacatgggactggagttatttagggctcatattataagtgatcagaaagtgcagaataagacaattgatggcattcttctcttgattgagagggaaaggaatggtgaagcaattgatagaagtttacttcgaagccttttaagcatgctgtctgatttgcaagtaagttaactactacacctactatacagagctgattgctatcctagttttttttccccccacatcagacaggtaatgtgctgatgtcataacaaggtttgaaggaagcacatctcatatatgagcataaaaacccaatcatcatgcttctcaactacaaaaggatcctagcttgatgtttaaaaaccaaattcataatgctgtttacatagacatagaggacatttagtaaatatttgctaaataaatgatctccttcattttgttccccctccagatttatcaagattcttttgaacaacgatttttggaagaaactaaccggctctatgcagctgaaggccaaaaattaatgcaagaaagagaggtatttaaaaatcatgactaataaattctcactgtctctcacaatagaccttactttgtagaatataagcttccctttgcatttatcttcccaacattgtgatgctcttctctcacttaggtgctcctttcttttctctcttcttaaaggccagaattctggatcataaactctacctataaatttttacatatgattctaccctgtcacatttgacagggccacttccaggatcttttggacttgacattttctgaatgatttatggggaggaaaacaataatgtaaaaaactatctttgtaggttcctgaatatctacatcatgttaacaaacgtctagaagaagaagcagacagacttattacttacttagatcagaccacccagtaagtaccacatgctgaatttaatagtcttaaactgtcgttaaatcacttgcagcactttagccatcctaaacatgttagtaactgttttcaggtgtgatttgaagtgttaacagttgttttcataatacaaacttcaagttattcttttccctagttaattagttttcatccaaggattcgattattaggggtgtgtgtgtgtgtgtgtgtgtgtgtgtgtgtgtgtgtttagaaggtaatttagaaataatactagaggctgatgtgacctttaaactcttcaggccaattaaaattcagtggattcccctatttctgtgctttcctaagtattaatattgccagtcgaggggcctctgtatgtagtacttctttaccttcctaataaaagtagcaaaacttggaaaaagccgactacagcaaggtcttggagatatttatttcgttatgtaaaccaaattctaaa

SEQ ID NO: 138807 - DNA, 1040 bp, Homo sapiens
taaattcccttaagcatttgtggcctagccccaggtcacgtgaaaagtgggcaggccagcagggtctcagccttcttattcctccatagctgctcaatctaattggcctgctgtttcctgatgaggtgtggtgacttgtctcgtggtgtaagaggtttcctttaagctctgctctgctctgctcttctcttcttttttcttctcttctcgagacagagtctcacactgttgcctgggctggaatgcaatggcacattctcggctcactgcaacctccaccgcccgggttgatgagattctcctgcctcagcctcccgagtagctggtgcacaccaccacacccggctaatttttgtatttttagtagagacagggtttcactatgttggtcagagtggtctcgaactccagacctcatgatctgcccgcctcggcctcccaaagtgctgggattacaggcgtgagccaccgcgctctgccaagctttcttttcatttgctgatttatttactggacctgcatattgggaatgtgacttctaactacatatttttaaaattccactccaacccacagaacttggatgcccccctagagttcattttaatggaatttttttcttctgttgtggtgagaaaggaattctggtgttacatttaagtcattaccacttggaattatagattatatcagagttttcccaaagagttttagcatgcctgttgttttaaatttgaaagtcttttatatatgcataacaggaaacttacggaaatctgaaggtcatccttctggaatctgagtataaaagaagaccaattcagttattaaagtgaagtaaaaatgcagttctttcttttgtaattggcgttaattcagttgtacaaattttatttattttttattttattcctttttgagatggagtctctctctgttgcccaggctggagtgcactggtgtgatctcggctcactgcaccctccacctcctgggttcaagcaattctcctgcctcagcctcctgagtagctgggatta

SEQ ID NO: 138808 - DNA, 1769 bp, Homo sapiens
cctggattaggagtcagaagatgggtttgggatctagttttgactgctgttaccctcataatcttgggccaggtactaaagccctctcagttttttttcctgtttttttaagagataggggtcttgctatgttgcccaggctggtcttgaactccagggctacagcagtcttgtcacctcaacctcccaaggtgctgagattacaggcatgagctaccaaacccagccgtcactctcaatttaaatttcctcctctctaaagtagaggaaataatagtttgccctacctgtctcacaaggttgctgataagaatcaaataagatatttgtggaaaacgcctccaggcactataatcttacaaatataagatggtatcacgagtcaaacttttttacaagccacattatagcttcttcacttgtagtatgacaattgagatcaccagtttctgttgctgtgaaaattagtacacgcaaaatactcaaatcagtgcacaacacatagtaataatgccgtgtaacattataagcattataatgctatgcaaatgtcggctagtagttgtagtactaagctattacttaagaataagcccatttcatatggctcttttggcgtattatatatgcgtctcttaaaatgtacaacaataaaagccaaaatatgaaactgacttggaaaggccttaagagagcatgtggtccaatattttttctttgtggtgtccatgacagcctgcaaaggggattcatctcgtattatctcatataagcattatggaaaccctttctggggtacgtagggtagtagttactatccccacttttttttttttttttttttgagatggagtcttgctatgtcactcaggctggagtgcagtggcgtgatctcggctcactgcaacctccacctcccgggctcaagtgatcctcttgcctcagcttcccaagtaggtggaattacaggcgcctgccaccacgccctgctagtttttgtatttttagtagagacagggtttcaccatgttggccgggctgatctcgaactcctgacctcaagtgatccacccgcctccacctcccaaggtgctgggattacaggtgtgagccaccgcgcctggcctatccccactttattgatgaggagactgagtctcagagaagttgaataacctgcccagagtcacatattggcagagcaggggcaactcaaactgagatgctggatttctagttcattgcacttttactcctgtaccacctcactaatataccctggtactttgaataccactgtagtgcagtgtttgaaacaattaaattgttttactttagggaaaaagctctttataattttagtagtatttttatctgtgcatgcataagtggtgtttatttggatagtatatggtgtttatttggatatgctggtatacagcatatttaatttcaataatattttatatattccatatttgtaacaaatgtttattgtggttattaattaaccctatttactttaccttgaatatttttccagagcttttgatttgaaaatacttttcctgatacattgattctgttaaatctttttctttcaagagcatagagcttgcatctcttgtttttgttttcttgtacttcgtaagttttacctgctgttgttcagttgcatttctttagcctagtcacaagtcttataacttcactgtttgcatttttcataataccttactgcttttgctataatgaattcaaaagcattg

SEQ ID NO: 138809 - DNA, 2778 bp, Homo sapiens
atgcataatcaatgaggtggaggggaggtccttttttggtggagggttcattttccgggggtggttaggatccttgtgctgaagcatacaccgggtgtttctgtgcagtattttgaggtctttttcaacctattgtatttaatctgttattccttataacactgacaatcggtatgattgatccggattttgcaggtgagaaatttgtattctaaagaggtttatttatttcaggtgcatagcgagccttggcattgctgggatttttatttttatgcttcagtaggccacattatccaatgcctagaaatgcaggtagcaatagtgatctttttatgctcaaataagatttataattagatttatactgtattcatgaaactcatttggaaggaatatttgaagaaaaatttatgttctctgcatttctttccaaaggtagggtttgaaagtgaaaaacattgtgtatacacagaagtagtaactctgtgtaccactagtctaaagataggaacaattactacatctattttttccatcactaaaatggattttaaagtatcgacctgcagcttttaggaaaatttgttcagaccgtgtttgagatatgtgaggagagtattatgaatacattgaggcaaatataaaatcagcaatttttaaaaatgtatttgagctgaattaatttttatttgttgaatgtgtttctgtttttctgacttactttttcaacacccgtaactgccaggtaatcagtgctacagtgtttattaaatagagaagtaaatgaatgaacttaagtaatatttatgagataagtgctttgtggctgaatattagtattgagaagattaggttctctatgcttgtgtttttaacattgtgtggaaatcaggagtatgctctattttgtctcaagcagagggctatggtgttgtctatttttaaccctttcttttttatatcactaccttcccatacccaggctctcagtttctgatttaatagtagagctttctgaagtcaatatgaattgtaattgagtaacgttttcattatttcacttaaaaatatatggattttgtagctaaagatttttaaatgagttatgatcctggttgcattttcaaattggtttcagagatttttttctctccctcctaaaataaaagcatattattaaggcatttggatattctaattaaaacttttttccccacactcattgctagtcagtgaagtttaaagcctagagtaagatgtttctttctattctgaaaatgcaacatggtttctggagtcatttctttcagtctttaaaaatttcactctgctcgtaaatgtagtttaaaacctgagttaagatgtttccatttctatagatgctgcataaatgtgggggtcaaacagacctgaattagaatcccagctttgccattgactagctatgatgaccttgggcaagcttactaaatgagttccagcctcagtttcctcggttgtaaaatagattcctcagggtattgttgggaagattaagaggcttataaagtaccttgcacatagacagtactttaaatctcaggttaaaaattcatgtcgacttaggttttacacatgatgaaataagatcaggattgttattttttatggtcattcttgaatttttatttttttgaagcaatacaatcaataggagaaaaacctcaccttcaattttaataggtgagtcaaaatgacttaaacagtattatggcatttcaaattttattctttatattaagcttaaatacagtggttactttaatgattaggtgtaatagttataaagatcacaatttaccctaaaattagtaatgctattatattttatgaatctttggttactgtatctgacatggtattctgatgccaaccttttacatatcatctagataagcctaaattaccagaaaactacacagatgaaacctggcaaaaactgaaagaagcagtggaagctattcagaatagtacttcaattaagtacaatttagaagaactctaccaggtatgtattaatatgcataaccagatttgattaacataaattgaggtgggatgtatatggattttgctttctgaaataggttcttaagtagacttttggttcccttctaattttagtttctccattaattgatgaactctataattagaccacgtattctcacataaaccatgggtacagtcataccagtataagttgtgcttatatttgaccctcctgataagaaattacagttacgtgtaccttggtgtaatagaagttctacctataatgtaatcctatagcatgaatcccaaagatgatttctggtgacatgtcattctattgtgataattgtttcttagttgtgttacctacccataggaaaggcctcaagacatgcagatattattcatatcctttattctacctccttcttaatagtagactttgccatttctttttcttgctctttacatttttctaatacctgggctacaagacgcaccttagcccagaaatgagtagcagtttgtagtccagcagcttagtctgaggttcagattctttacttagcaaatgggtccttacacttaaatataattttaagggcagttcctaagggcaatcccttgctaccaagaaatttttccctactgtgtatttgacacacaaccaattcaagaagttactttcattagagtgtcagggatttggtgttaaaagatacttcaggccgggcacggtgg

SEQ ID NO: 138810 - DNA, 2166 bp, Homo sapiens
tcccaggtactcaagaaggctgacgcacaagaatcgcttgaacccgggaggcagaggttgcagtgagccaagattacaccactgcagtccagcctgggcgacacagcaagattctgtcttcaaaacaaaacaaaatgaaaaaaactatgtggtatattcaaaacagataggagtgcttccatctgtctcctttcaggcccccatctcccttctcagcggttctaagttccattagagccttgctttcagcaggctgtcatcaaatagcaatgatattgtctaataatgccaaaggttgatttgcattttaatcagggacttttcaagacacaaaaacaagtgggcctgtttaaacaaagttagaaagttgatttatttgcagggttctgattcacctatcacaaggtataccatacaagctgcttttactccactcacaatcctgtcacccctggtttgtaaaagctctgcttgctggattgtctccctgctatctatgatcgcctacagagtagactccaaattcttggcttggtgtgccaggcacttttgagcctcatcttccttactcccagccagacatcctacttcccagcctcactgcactttccatgtttccataaacaggcctggccctttcactccttgctttgcccttgtttccgttccccagaatgcctttcatcctgttccctcttctctttttggcaactcccactttgagacacagcataaacataatctctgtagaactcttcctattccagatttctcccaaatttcttgttttgcctcttctgacagcactttgtatatatgtcatattattgttatggaaattagttttgaaactatcttcccctactggcttctcaagggcagagaccttgcatagtcttaccatacatgctaactgaatgcttttgcagttagaatgatcaacaggttggcaaatttagtttttgatattgtgttacctccctctgagaatgccccaaggttaagtaaaaactcccaacagggaatttacaaggtttattgttgctaatttaaccaaacttaaagattttttaaatcaataatcaattgtaaagcatggggtcatgaaacacattagtagaaaacactgacttttgccgatatggttctaaaatgtctcctttgggacagcgtgtaaactgagatttggcaaaagaaggaagtgggtcttagctttgttgggtctataaattactgagttaaggactgatagagtgggggttaggacgatcctgggcatagtgctgggtgggtgaggggttagttacctttccatttcttcgccttagaatacacacttaatttggccagccagcttagaaaatgctcctggtagtaagataaaaggatttacagctacatgaaagagaaaggcatcaaaattcaggccttattcagccttgggtctgtggtgccttgagataaaagagaaacaatttataccggcaccgaattaaaaagtccttttcttcctatcttagctcgttttcttctcctttcctatcttaacatagggacattcctctccagcagcgggcataatggcatgattatgttttcctctatttagggttactcccctagccttgcaaccactccttattctttcatctctttcaaagtttctattctcccggacccttacgttttattccgtccctccctctctcctcctcttcctcctcctccgttttcccagctagctcactccgcccctcgccgtcactaccttccctcccccgaggctccttcccgctcctcccgccaccccccccaccccctcgccttcagaaagctccaatcaggagctccgaaggtgtctcgaaggcccgccccctcctcctatccacttttcttccccccaatttctccctccccccttcccccccccactcaagtcctgcggacctgggggcttcgggatctgggcgctatgaaaagtgtctgcccagtcacttccggtaagggcgctgcggcgcgaagcttcccgcgggaccgttaaggagggagtgggagttcccggtgggccagggaaggaaggcgctgccaggaaaggggatcgcgaaggggagcgggagcaggagcgaactagcgcgagcgtctggggcactttagccgcccctttcc

SEQ ID NO: 138811 - DNA, 1669 bp, Homo sapiens
ggcgcctgtagtcccagctacttgggaggctgaggcaggagaatggcatgaacccgggaggcggagcttgcagtgagctgagatggcgccgctgcactccagcctgggtgacagagcgagacactgtctcagacaaaaaaaaaaaaaaaaagtaaatggactgccctttacctagcagtttttttttttttttttttttttttgcactctgtcacctaggctggagtgcagtggtgcaatctcggctcactgcaacctctgcctcccgggttcaaacaattctcctacttcagcctcccaagtagctgggaccacagatgtgcaccaccaggcctggctaatttttgtatttttagtagagacagggtatcgccatgttgcccaggctggtctcaaactcctggccaagtgatccacccactctggcctcccaaagtgctgggattacaggtgtgaaccactgtgcccagccgttttttctgttttgttttgttttggtttttgctttttgttgttgtttgtgtttttttaatgcattctcagaaacatcttcagattctcctgggcaagcagtctctcccattcctaaggaaaatcccacccattggataggaaggcttccaggagtgtctgtctagtggcaagccactggtatgagatatctggagaggacctaaagcaccccagatggctataactgtatggcgtcctacattacacatcttgattccccaagcaccctggggaatccctgtgatcaaaaaggggaaatgggttacactctgcctttttagggagatgtccacagaaataaaggaattgacattgtaaaagctagctccctgtctttgtttgtatttcttcctttacacatatacttacctttataaacagcttggttaaaggtggccaataataactacacttcatgtggcaacattgtaaagtttaattaatgtttctaaggtatgagttgaactcacaagatgaaagatcctaaatatggaatatgtgttaagtgcccagtctggtttagtctgataatggctataattgtatggtgtcctacattacacatcttgattagtgtggctcccgtgagttcaaccttgaaaatgtattttaatgttgagaatgtgtttaacgttgattggcaaacatttgggtgtacagaatatacgcttatgttcttcaactagcctcaattagttggttcttgatgtaaaagatattttacaaaccaacttggaaggtttttgtttttttttgagacagactctttctctgttgcccaggcaggagtgtagtggcacaatctcggctcactgcaacctccacctcctgagttcaagcgattcttctgccttatcctcccgagtagttgggattacaggcacctgccaacgtgcccagataatttttgtgtttttagtagagatagggtttcaccatgttggccaggctggtcttgaacccctgacctcaggtgatcggcccgcctcagcctcccaaagttttgggattacaagcctgagccacctagccttgttttttgtttgtttgtttgttttttgtaacaaggtctcactctgtcacccaggctggagtgcagcagtgtgagcttggctcactgcaacctctgcctcaggttcaagggattcttttgcct

SEQ ID NO: 138812 - DNA, 1335 bp, Homo sapiens
tgaatttacctaaattccccttccctaaattttcctcccatacttcccctagagcaatctcctatcccagatcttacattaattattccccccaccccaccccacccccttttttttgttatctccctgtgttgctcaggctagtctcgaactcctgggctcaagcgatcctcctgcctcagcctcccaagtagctgggactacaggtgcataccatatcacccagctattttccttctatactttaatacttttatcatattatatatctgcaagtttttcttatttttgagctttatttaaaaagttatcaaattgtaggtattatttggtgatttgtgtttttcacataacattgtttgagacttatgcacatggctgtaatttattcattgttcaatgctgtatagtatttcattatgtgactataccacaatttatttagccattttcttatcaaagaatattctcttgccatcctttgaagtctgcatgcagaataggaatagaaaatccttagcatgttctaaatcactttctcctttgtgccatgtctctgtttttaacaattagtatattcaaatgcaaggactggcaatttttttttctgttaaggaactagtaggaactattttagactctgtgggccatacggtctctgtcaaaactctaaactctgctgttttagcataaaagcagccacagaaaatacataggcaaataaatattgcaatgttccaataaaactttatttacaaaaacaggtaaaggacagggtttggtccatgggctgtggtttccaaaccctgctgtagtttatctgaatttttgtagtgttgcccagtattgtggttcttattatcaagtctgcccttgtcttactttgcacgtgtcaaaccctattctcccgctttgtgattctcacctcctatatctaagagtgagcctgacttgtaaatccaattcctgaaccagtgtggctcaaggcaagaagtgttatctgtagccacagctccaacagcaagtagggtatttgagtaagatttggtgctaagaggcctaagattgctgtaccagacttgagattgggatgctgccttcatttccttcattagctcttcagagtttctggttaggactgaagttacactctaataactagtctccttgcaatgtcctgaatgtgccttactctctcttcctttaggatttaaatgtgcttcctatcttccttctttatgccccctgctccctttcactccctttgcctggctaattcccactcactctcggggatttaaattggatttctttctctggaagctattcttaatt

SEQ ID NO: 138813 - DNA, 1802 bp, Homo sapiens
gcgagagctaagatcctctttctctctcccccgcccctgccatcctgactccctaaggttttctatagtactatgctctcactcccaacttgaacacttctttaagctttccatccgtagtccttaattgggtttcagtccctccactcccattgttttttctccttacccctctttctcttttgccccctcccccaattctgtctccattcctagggttctaccaatcacatccgtgcactgtgatttagaggcatattctctgtagctgagaggggagccctgcgctcactgccatatgtttattagttatgaactgaataaaggaaggcttgacttcctgggtcatgggagtgaaggagtctgggtgacaggaagcaagcggcctgtcatgcctattgcctagctgccagattaaccttgccttgaaaataacgattgccccataggctattcagtgtaaggaagacaaaaattccttgggaacctactagtgggtttgccttccagatttggtagacgcaaaaagcaaagggggaacatgggcaaaggaaggtgggttttgtgcatgaaattttgagcaaaaacgaatagggatcttagaaatcattattatcatcacttaaaaaaaatctcagcagattacatagcctagcaggggccgattttctatgttatgcttgggttggtcttttgtatctcaagaattgagggttttgttttctgatctcaggttttattattggtgggagcctgtgtttcttcctgggtagaattgaataagattttccaggaaaggcatttgtgtagctaattacagattatggtgcaaagtatgtctcatattcctccccctaaccccagctaattgctgtatacttgacagtttatttcaatattgtattaagacattggttttgtgctggacagagtaaaagggagatggtatttttttttaaaagaacaatttatttcataattaagtatctaaatacttggttgggaataaatgactaattagaacagtacctttaggtattctgatacctctacttagaaatgccttttcttttcttgcaaaaattacttggcagatttgatgaaaaagaaaatgtgtccaactgcatccagttgaaaacttcagttattaagggtattaagaatcaattgatagagcaatttccaggtattgaaccatggcttaatcaaatcatgcctaagaaagatcctgtcaaaatagtccgatggtaagtctttgtttttgtctgtgtaaagctcggtatagctgaatatttaatgattagattgcactcatactaaatggaattattttcagattaactattgatagattaataatggggtagacacagaataactctaaaactccaatatttgtattttcaaagattttctatgtccctgaaaaaatgtggctttgtgtattgattgttctagtaaagagttaaatgttttagttcagagttggatttaatttatttcagtttgttgtttagagaattgttttattgaattacctaacaatggaattaataaaatgtgaaataaaattggttgtagcaggtaatatttttctttttttctctactggacttgcatgataggaaaaacaatgtaaacaatattttttggccaggatttttactgactttttaagaaagtttatcactgtatatgcgtgttttatattgtgaatttttgaaagaaaatatctaacttggtactttgtgacatttgtcttacagccatgaacatatagaaatccttacagtaaatggaga

SEQ ID NO: 138814 - DNA, 1053 bp, Homo sapiens
cctttgcctttttctgttgagtcattagtcttattattaatatattgtatatcttttcttacagatccttttatcctgccacaccagcaggttgataaaggagccatcaaatttgtactcagtggagcaaatatcatgtgtccaggcttaacttctcctggagctaagctttaccctgctgcagtagataccattgttgtatccttcccaggctaaaactgctgaaaaatgtattcattgtgctcttatcattactgcgaaaggtgtaccatccaagagaacattagatgtacttttttgaaggttactgttactcttatctcatgcctttctggttacatttgaagttgtacaaagtaattttatttgttgctactaaattatctcatcttaggtcgtttcttagaagttaaatgagaacaagttacagaagagtctcagctgcatttcagcccagtcagggcctactgttatcagacttaggacacaatagggaattcttgattactaggggaaaggatatagatgatataattggatcagctttttggatatcaacttgccactgtaatgttcattttgacttactgacatacgttggagtgaaagctctcaaaagggaaaagaatttaggcaccaggtataggtatctcttaccaagcaacaattttgtgttaggagtgaatagtgggaaatattggcaacctccaacttttattttgaaaattaattatttgaaaagttgagtttgggggcctcagagcacgttttctcaaagagaaatgtcagagtcccagatggtccttaaagatcgattcaactcatgacatagctgaataattctgcattatttccatttctaccatgctgtttcagctattttctggattaaatagatttttgtgactattctggacaggagaacatcttctcctttatcatagctaaagtagccatttgcctcgggtatagaaaaggaatggtacttggtgggaatagggaaactacttttagagtgtgtttatcttattttagtttttgagatggagtctc

SEQ ID NO: 138815 - DNA, 1028 bp, Homo sapiens
cagctactcgggaggctgaggcaggagaattgcttgaacccgggaggcagaggttgcaatgagccaagactgcgccattgcactccagcctgggcaacagagtgagactctgtctcaagaacaaacaaaaatccccactagtcagtgatcagaataattaatcagaacaattaatatttattgatttcacagtttttagtatttatgtgcaagaaattttactccttttttgtgtgacttattctggttttgttagcatggggttatagtattaacatttgacttgaaagaaaaggggttattagatttattcatttagcatttactgagtatttacagtgtacccacagactctgctaggtctctgctctcaaggagttaatggtctaggagaagacacaagaggggttccaagtggcttaactagtaacatgatcattatttgacacccttcccttgatggggaggccccaaggcattttgataaatagttttcttagctgtgttctttcaggctatcatggcagaaggaaaacagcatgctctatgtgttggagtcatgaagatgtctgcagaagacatgtaagtcttactttaggcccccttaacttttgatatatgggtaaccaacccaggaagcatcagaattacaggtgaaatttgctatcatgcataccacattacacaaatatccaagcacagaagcttcatttctgatatttcctaacacttaggaagccaatgaaacctattttgtcttcaggattgtagtctttcttaagcactgaaaagaacccatgtgccaacacagctgttttatatgtgtgtacgtggtactttaggaatcttatttagtatcatttaaattgggggaggagggaagatgttttactgctagcttcattttatttatttttatttttatttttttaagtttttttgagatggagtctcactctgttgcccaggctggagtgcagtggcgcgatcccgcctcactgcaacctctgcctcccaggttcaagcga

SEQ ID NO: 138816 - DNA, 1034 bp, Homo sapiens
gcaagtattaattatactaatgagttcagatgtttttatttatttttcctcccaatgacctattcttaatgaacatggtattattaagagacattccagtgaatcatctcctgtatttttttacatgcataaattatattccctaaggccagactcttaaacagacagatgaacctaatagtctcaacaatgatttaaaaactggccctcaattttcttcattcattcctgatctcgtggagttgtggtcctttacttggttttaacacagtattcaacaaattgttgttatagttgataacatctactcattcttttacctgccttaaaaagtgtaataaaagtattcatacaaagtataaaatacatacaagtataaaaatgtataatacatttaatttacatgcatctctacaatgacaagtatgatttctttagaaactgatgcatacattttcactgtttttctttcattatatatcagttttaatgcatactacttagaaattagaatcattttgagtttcttgaagagccttgataattatagtctcaaaattaaggaacctagacaaacaaagttaaaatatttatgacattttgcttgggcatacattcatatttccattaatatataattgctacattattaataagtgacatatttattataatgaaacacctccacgaatttagtgaattgtaattcttatctcttcctctgaagtattatacttagaaatacgtatcttcagttactgatttgggtacgacagggaacctggctggatatcattattatttgatatatgccatataaccttctgtttggggaatataaaatccctcaaattggaaatgttcatgactacccatgggataaatccagctgtttttgtttggggtccagagcataaaaacagaaaaggaaaaatgcagcttcccaacagaccactaccaaaccaccataacagacagtctgctagaagagaactgatcaggccattatgtcaccggacaacaggacaatcatc

SEQ ID NO: 138817 - DNA, 1169 bp, Homo sapiens
cttccccagatatcttcaaagcaactgctagtcctgcttttgcacattacactctacattctcattgccccacttaactaaccctccctcatgtccttttctaaagatgtagaagactttgaaatagcataacatttaaatggtcacaaatcacctggcttgaaagtgactaataataggaaaatcagacctcaggactgagttcaatttcaagattctcccactccactttgctaagagggaaacagaaaaacattactccagccacacaaatatgatactgtgcaagtatcccactcttactcattcaaatcctacccattttttcccatcgtggaacagagtcttgccaacttatacctctctccaataacccataaagatggtgatttgaatttgggccaagatttaacattttatgaaatacaagaggagagttttctgcaaaacacaggatttgcagacaaggagacttaggttcaaattccagttctgccatttattacctcagagaggtcatacaactttcctgaagttgtatgacctctctgagccttagtctcctcgtttgtaaaatgagagttaaaatctacctcatggaatcattgctaagattaagcaagatatataagtagagcttgtgcacatggtaggtacttggagaatgttatttctccttccctcttactcatctggacaagtttaactagaattctaaacagttaaatatgtatcaatcctttgtattaaatatcttgatggtaaaatgttaaaatattgatgtgaataacagctggtattgaatattcaaattaggggaactctttcattgttttaagataacatctgtacatttaatctgtgccatgcaataaaacagcttttcctgaaacagctttttaaaaactatttttaagaaattcataagttacttttaagaacattagcttagaacatcttcccctttcacaacaaattagacattagagccaaaattgcccaaattggtatagtttctatctccctacactttaatcaagatgtttgtctttatatcagcaaaaaccgctacttaagtgagattcctgcatcccaataaatgtatctgggcatttggtacttgagagaggattgggtttgacaacacccagaagctaatgaggatgtgc

SEQ ID NO: 138818 - DNA, 1567 bp, Homo sapiens
atcatcttcacttacattagtacatcagagtatcatcataaacatgtcagaatgcattgcattgtgtgttttgctaatgagtactaaggtaacattgccttttaagccaaattgatgctcttgattgtatctttatacatattttttttttttgagacggagtttcgctcttgttgcccaggttggagtgcaatggcgtgatctcggctcatcccaacctccacctcccgggttcaagcaattctcctgcctcagcctcccgagtagctgggattacaggtatgtgccaccacgcccagctaattttgtatttttagtagagacagggtttctccacgttgatcaggctgttctcaagctcctggcctcaggtgatccgcccgcctcggcctcccaaagtactgggattacaggcgtgagtcactgcgcccggccgatactgagtatttttttaacgaaatgttaggtgtctcaaataatatgctgtctctctgaacttacttgcagccagtcttgcagataaaatctgaatcaataacagaaaatagtactactgaggttgtggttacagatttgatcaccatatatgtctgttagctttacatagaaaaataatatattcagtaaccgaaaacaataaccctaaccccactcatgatgagagagttggaaaaaatggaggtctgatggaaattgatcgggattgtgaatatactctacatacggctagtggctgtcatattggacagcacaggtctaagcaattctaagtgtaagatcccactcctggctgagatgtgaataagagaaaacttgaagtttcctctaaaagttgtatttgtttgtctggttgtctcaaatgcaatggaaaccacagcatgacttttagcaggccccagaccattgccttgtgtgagttcaatcactgaatcttccttttcaaaagtaaaacattggatctggagcaaaatatagatttagaccccttggctattttctggggcggtgggctggcaggggagtaagctaaaaggttgcttgtgtatcaaatctgattcataatgcccagatttttctataatgcatttaaacaaactcagttattgggtgttcttaaagcagggcatacctgtaatagaaaagttgctgaaaatatagtctaatgatgatgtaccgctaatttccctttcatttgttaagaatattgtgttctggctgggcacagtggctcatgcctgtaatcccagcactttgggaggctgaggctggcagatcacctgaggtcaggaattcaagaccagcctggccaacatggtgaaaccctgtgtctactaaaaatagaaaaactagctgggcgtggtggcgggcacctgtaatcccagctactcgggaggctgaggcagaagaattgcttgaacctgggaggtggaggttgcagtgagccaaaatcgtgccattgcactgcagcctgggggacaagagcgagactccatctcaaaaaaaaaaaaaacaatattgtgttccttttggtatgggctgactttgatgcactcagtacttgcctgag

SEQ ID NO: 138819 - DNA, 1484 bp, Homo sapiens
taaagagaatggtggatggataacctctgtaacactggtttcaagggtttattaaatccccatagatgaagtgcaaaacaaacttctccatagaggagttgttgcaaagttccagtttataccaaacagtaatcagattccattggaagctaaagattttgagagccttttgtactatatgcaactaacttgatttcaagcttgggaaccttttaaaaaaaacattaaaagcaaaatgtaagtatataaggaataccaaatcaaatttatagactaatctttttctattaagtattttaagagtctttttcttctttataggaaaaatgctttctgaaagcagctcctttttgaagggtgtgatgcttggaagcattttctgtgctttgatcactatgctaggacacattaggattggtcatggaaatagaatgcaccaccatgagcatcatcacctacaagctcctaacaaagaagatatcttgaaaatttcagaggatgagcgcatggagctcagtaagagctttcgagtatactgtattatccttgtaaaacccaaagatgtgagtctttgggctgcagtaaaggagacttggaccaaacactgtgacaaagcagagttcttcagttctgaaaatgttaaagtgtttgagtcaattaatatggacacaaatgacatgtggttaatgatgagaaaagcttacaaatacgcctttgataagtatagagaccaatacaactggttcttccttgcacgccccactacgtttgctatcattgaaaacctaaagtattttttgttaaaaaaggatccatcacagcctttctatctaggccacactataaaatctggagaccttgaatatgtgggtatggaaggaggaattgtcttaagtgtagaatcaatgaaaagacttaacagccttctcaatatcccagaaaagtgtcctgaacagggagggatgatttggaagatatctgaagataaacagctagcagtttgcctgaaatatgctggagtatttgcagaaaatgcagaagatgctgatggaaaagatgtatttaataccaaatctgttgggctttctattaaagaggcaatgacttatcaccccaaccaggtagtagaaggctgttgttcagatatggctgttacttttaatggactgactccaaatcagatgcatgtgatgatgtatggggtataccgccttagggcatttgggcatattttcaatgatgcattggttttcttacctccaaatggttctgacaatgactgagaagtggtagaaaagcgtgaatatgatctttgtataggacgtgtgttgtcattatttgtagtagtaactacatatccaatacagctgtatgtttctttttcttttctaatttggtggcactggtataaccacacattaaagtcagtagtacatttttaaatgagggtggtttttttctttaaaacacatgaacattgtaaa

SEQ ID NO: 138820 - DNA, 1027 bp, Homo sapiens
gcctgggccccagccctctcccagcatgctccacgcgggatgcttgggcaggtgcagcgggaggattgtcagcacaggagaccgagagtcttcttcctgggggcgctctcttggtccctcagagggatatcgaggttaccatgtcctccctctcacttctcttccctatttcgtcttcgttttccgtacttcaccccaactaccttcacccaaaaaggttcatctaaaaaccattggggtagtttctgtttcatttgtgctcgtgtgcagttttgtttccttctgcacaaagtatcctatcatatgcatccctagtgttatattttttgcctctgtgatggggaaaaaatctccttagaataatttttgcaaattattttatttaaaatgtgtagacttactgagttttgatcactatttttgcagccaggagtaggatcaccatcaggaagaattctgacacatatgccataattgagcaaagaaacatgtgaattatgtattggccagaaataatgaaaactgcgtgacatgaaatacaaaaatcctatataaattaatcttagagtgcacctgacaattctttttcttttttctttctttctttcttttttttttttgaaacagagtctcgctcttgttgcccaggccggagtgctgtggtgcgatcttggctcactgcctgcaacctccgcctcccgggttcaagcaattctcctgcctcagcctcctgagtagctgggattacagtcatatgccaccatgcccggctaatttttgtatttttagtcgagacagggtctcaccatgttggccaggctggtcttgaactccctacctcaggtgatccacctgcctcggcctcccaaagtgctgggattacaggcgtgagccaccgcacacagccgacaattctaatattatgccgagcttgttttctgtcacttctcttcttggaactgtgtttattgaccaagttctgtgagtgacacaggaaagtcttcctgcctcttgccccacccaccgc

SEQ ID NO: 138821 - DNA, 1474 bp, Homo sapiens
ctgttggtgagtctgatgggagtatatggaatccagatggtattgacccaaaggaactggaagacttcaaattgcaacatgggtccattctgggcttccccaaggcaaagccctatgaaggaagcatcttggaggtcgactgtgacatactgatcccagctgccactgagaagcagttgaccaaatccaacgcacccagagtcaaagccaagatcattgctgaaggtgccaatgggccaacaactccagaagctgataagatcttcctggagagaaacattttggttattccagatctctacttgaatgctggaggagtgacagtatcttactttgagtggctgaagaatctaaatcatgtcagctatggccgtttgaccttcaaatatgaaagggattctaactaccacttgctcctgtctgttcaagagagtttagaaagaaaatttggaaagcatggtggaactattcccattgtacccacggcagagttccaagacagtatatcgggtgcatctgagaaagacattgtgcactctgccttggcatacacaatggagcgttctgccaggcaaattatgcacacagccatgaagtataacctgggattggacctgagaacagctgcctatgtcaatgccattgaaaaagtcttcaaagtgtacagtgaagctggtgtgaccttcacatagatggatcatggctgacttcctcactaacctcttcacgtgtaacttctgcagacctaccacaagtttacatgtaaccacagaaatccctttctctcctgactcattactaatggataccattctcaacaagtcaatccaaatcagcccgttaaggagaaagaaattaatatacaagctgagtgtgaaagtagaaatcacctacaccagagagctattttggtattttgcctttaaataaaaagcctcctccatatggctgtgcagccttgctctgtggcttttcccagcacaatcagtgctagtgctggggaagggacagtcaagagcagtcagttgcttacttattttgctctggatgagtctgggacacgctgtaactttaacacatttaagaagaaggtgtgtggccttttcagaaggtggcatggtcctcaagtgagttcttagtattttatatcagcaaaataactcaattttgcagattgcaaacaaatataaaagctgtttctgtttatgaattttattcttttagaatagaataagtacatgctgctgtaataaaattgcctttaatcacttaacaagcctaaccttgactcagtgaatgcctataaaaataataaatgaaaaaaaacagtatttttatatcataaaagtttcatttgtagcttatcattcacgtattgttgtccagcaaacattaaaagccctgtggataattacgttatcttcatacctgcaaaacggtggaggctattttcgttaaaactgtcagaattcgc

SEQ ID NO: 138822 - DNA, 1043 bp, Homo sapiens
gtttatgtgcatagaggttttcataatagtcttgaatgatcctttgtatttctgtggagtcagttgtaaagtttaaagtttaccatttcatttctttttttgccaattttaaatagttttatttaagacattgcatttttccatgtacaatagtgtttataaagtgcaatgttatatccttcccctgtgcatatgttccatattcaagcattaggaatgcccagtaacttactatagcagctgaacttttaaaaactgccacagaatttgctacaaatttaggtccttcaatgttttaaatgtgtggaacaatgctacatctatacttgggttggcttaatcaacctcttcaatggtgggccctgaggaagcaccaccagagggaggagctccaccaccagggaatcccccaggcattcctcctggcatgcctcctgcactctggtacagcttggtaatgatggggtttcagactttcttcagctctttctgctgatgttcaaattcttccttctcggcagtctgattcttatcgagccagttgataatttcattatacttgtgcagaatcttgtgtttgtcctcatcgttaatcttgcctggaagtttctcatctttgagagttgctttcatgttgaattcacaggaatcaagtgagttcttggatgacactttccctctgcttctgatcttcagctttgtacttctcagcttcctggaccatatattcaatgtcttccttgctcaaatggcccttgtcattagtgatagtaatcttgttcttttttcttgtactcttgtccacagcagaaacattgaggatgccattggaattagtgtcaaaagtgacttcaatctgaggaacacctcggggtgcaggaggtatgcctgtgagttcaaacttgtcaagcaggttgtcgtccttggtcatggtatgctcaccttcataaagctgaataagcacaccaggctggttgtcagaataggtagtgaaggtctgtgtctgcttggtaggaatggtagtattatgtttgatgaggtca

SEQ ID NO: 138823 - DNA, 1060 bp, Homo sapiens
tcagtagatattttaggggctctaatccatccggtttcatgttgcataaatcaactccaaatgatactgctgaggggcttaagacagtgggaaaaactcaagacagtgggcaaaagtctgctccaaatagtgtttgatgcaaaagtttcattttcctccatgctaacctagtgtgttccttctccaacactctctctcttttttttttaactggggaaaaaaaaagaaagaaagaaaaaaatagcacggttgttcagagaaatttcttcagatgagatttaaaaaagcagcagcagcttcttgattgagtcaattcaggatgtacatcacttgactgttaaagctagtgcctggctctaggaacgagctgaatttgacaattgcctaatgtgtaggaagcaaatatgagaaattctgcaaacaagtgaccttgaggggcagaacaggctgggttccctggcctctttctgtcctcaaatattaccttacttactgagagagctctgataggaactcataagactacaaactgattgcaagtgatgaatgcctagcaaactgaggggaggggagaaaatggtgatcaggtgatgatttagaaagctagttctgcctcccctagtgttgttcacccccatgatcattaaagacaacacagttcttaatttagagcaaagagggggcaggaggagaggaggcttggagcaggaaaactgaatatggaaagagaagaaattcatcaggcccaaagccggttctgaaatccttagttgtaccgggtgattattcctctgaaaaggggacattttgtaaaatacaaccaaaggaacctaaatggctaatagcctgttggacatatggttttacttgaatggaatgtttcgtgagaaagactgagaatacttcatgtaagcttatttcactaaaagttttcacaacaatgaggctgaatatggtataaaatatgctttgcttttatggctgatgtagtttggaatttggggtttttcttcctttctcttccaagggagaaatgatatttatgtttggatgggtgaaa

SEQ ID NO: 138824 - DNA, 1048 bp, Homo sapiens
agggtctctccaagggcacaggtttcttggctttgaagacttgggccaagaggatgggggtaacatactctgcaagaaatatgacagttgtcagctttaagaaaattttagctgaagatacagatccttatatgaacgtgttctgagatactccatatttgactttctttggctttctgacattgacaaaaataggaatttattaattccagctagtgtgaaagttacgaaatgtctgtctatactttgcatcttattttggtaatcccagcctgtctccacagcatttacaacacgcatctgactcttaatcctgcagcactgtgatcttgtcaagaggctgaatctcaaatgcagcttcctaaatatcaattagaacagatttaaaactaaatacattaaactaccagggtttattaccattagtaacaaataatatttatttcaactcccttcagtgtcttttcactgatgagaactgggataagagaaccatttggtttctcagaaatgattgatttccaaggtttttggtcctgttcttatggtcaaaccagattgacacccaccagccctggactgtcagaaccccactcaagaagcaatcagaaatgattcttgccatgtgaaaatctcaggtttaggaaaaggcaataagtcatccatattggtattgagttgccttattgccttacctctcagggcaataagagaacaaccaggggaaaggaaaagaaattgatcaaaatccctcaccgtaaattcatagcatttccacttacaaggctgggttgtggctaggggcttgagagttcgggagaaggagtgtggctcactgggcaacaagaaaaagaaaatgaaaacgtgaccttgcccttagttatgtcaaatacacatgtatgcatgcacagacatacgcaggaaaaatagctagaaaccagtgttgtgtatccagctgcctgttgctttctctgaagacagaggaggaaagctgtcatcttctctggtccctgaaacagtcatctctgaatgtcacaatcattgaatg

SEQ ID NO: 138825 - DNA, 1110 bp, Homo sapiens
tacatttgctcatatcattctcttctcaggttcctgttgatttttctctaagatgaaaaagcttaggtgagactgaaataaatgaacctcaagtccccagcctcccctacctcagcaacttgtcaagagagttggagattttttccatcgttatttttcaaaaccaatttcctaactgttgcatgacaatcagcagtcaaactaattggaatgttactttaacatttcttcctccttttagcattttttgtgctgtgttgtggggaggaagggatgtgaggtttcagcgatgcttacatagaaccttacctttcctttcctttcttatcactgctcccaactgggtcttcagcttcttgggtcagtgggacaaactacaagcaactgctacagtgtccctttcaacttgcatctcttctcatatctagtggggttttggggattgacaaggttggcacttctcagagatggagggaagggagaggcagtggttgaggagcaggaccagaggatgaagtgcagacttggctagtaatttcttgtaccttccatttaaccctatgccaagcctccaccaccaccaccactgaggagaaggaatgtcataattaaagaaggctctacgaatagcacagatattgtttctaaacaggaaaaagagtggtaggggaaggaattctattaagcaaacattgttggtttttctccccctgattttcttcgagaaatgtgtgtagggagagactacaatgaagggtcataatctattaaatacacggactaaactaagtatgccatctcaaaggaaaacataagtagtgtttaaaggtctggtctagtctcagctggtcagcctagaatccactggacaactgcacttcattactaacatctaactcctcaaatagccttttagtactatgtgatgctgctaaagggcaaaaggtgctgacagggaccatggacatttctgcagtgcctgtccccccggtagtgttcagatcttgcaaagccaacaaaactgcagcataggtcagctgcaaactccccctcatcagagacctccctgagccagcaaagtcaaggctgtgagctcagggccttcagaag

SEQ ID NO: 138826 - DNA, 1105 bp, Homo sapiens
gaagttgccaaactgttagtgcatttttcctgggtcatctataaacttgccttccttactaatgttttagaatgagtctacctctaatccccactttcttttaaggttcaagaagtagacctcactttactcaacagctgcattactgaaaatatgtgtatatgggaagggcaataccaataaacacacctcattgaatcgatctataatgtaaagaattccattattcagtaaacaagcataaggctgacctttggccaaattgaccagtaatacacagctgtggtcaaaatattatatgctcccataccagttggtaaatagctactacaccttgtcctggatgccagactgtactctgagatccctagacctccacaagatccagcagctaatacagtaatgcctgacacagcaaagggcctccgggtccttgctccagggctacagctggaacctagactgatttgttgtttcctgtgctttcctatgtgaatattatccacaatttcaaagctactgagtagcaggcactaggtgtggccatgaatgtggaccataattactttgcttaaaactgtaatagtgacactgaggtttgtgtcagttcactctgccccatgcattcccatggagcagaacgtccacgaccttcaaaagatggacgacatgagccctgtttccaaaatagcacttggcaggcagcctagatttggatgtgaacagcagacacaggctatgggcatgatgggccagccccctgtcacatcacctcaggggatcctcagcctcatgggactcactagaaaatcctttacatctgaaaagcagaaattatctagtccacctgagtgccctgggagtgggtctgtattcttagcctcatgcttccagtgctgagtttagaacaaaagcctctattcaaggtcatatggtgagtcagctactgaacagggagtgaaaagaaagggggaacaaacaacccacaacaggattagcttgagctgcctcaacctatgagaaaggcctggtcaaaccatttatagtcttcatatatagatagcttgaagaattgcctctgaagggtgttaatgaacataggtaa

SEQ ID NO: 138827 - DNA, 1899 bp, Homo sapiens
gtaaaataaacttttccatataaaatttcatttggagaaaggatttcaccactaaaaactatgcttgagaaacaagtgaataaaaaataagttccttctagctcaaacattctaagaatctaaaatcatagacattgtgggtgggtcaactcagtgttccattcaaccctacttttgacagccaggaacaggcctaggatctgctgtgaaaggcccttcacaggtcccccatgccccagcttctttcagaggccattaacactgtcctcatatggcagttgtcttccccattgggctaatccttcgcaggccttctactgatgtctgtctatgttggagtgggtggagcacaggggtcaatatttgaaggacagttgtacttctgttttatatgaaaggagtcaaatgtttcctgattttcacctaaaactcttcttattgatgtccaccaccaaaagacagtggatctgccttttggaccacggtggcatattattccctgaggattgccactgatctataaatattcctgagtcccttgtctgagtcacaaccagagctgtatgcttagtttggaaattttaaatttcagtgggttttctcacacaggctccctacacatttttataagttcttcttttgtctcattcttcttgtcataatatacaggcttaaagatttcactgggttcaccttcctggagacaactcataaagttttaccaaagtctgggtttcacatatacaatatgactcccttgatataaagctttaaaacaagcaaaaataataatatatcgtttaggtgtatgtgtttgtatatttttttaaaaccaaggtaataataaatacaaatttcacgatagtagttacctggggcaggggtagcagggaggagtgttatcaatacagggagatggactagaggaggaccacatagataaaagtaagttaccagtaatgttatagttctcaggttgggtaatggctttataggtgttcattatagtctaaataaataaatgaatgcaataaataaaatattaaaagtccgtgtatgaactaacaatgattaattaattctgcaccccgagttcaaggtcaatgattagaagagcaatacaagattttttttaatcaaccagaacctcgccacttatcttctgtttccttccactatttcaagagtttttgaaactgaaagtggatcatggctatagttttccttctttttaagtttatattccccctcaattattgcccataatctagtcaggttggagttctccttactgaaaatatgttgcattttcccatgagactatttttgtataggattcatggatcctaatttttcttttgccagttggtatggatctgagaattaccagctaccctttgaatcattttggttgaagggccatgattgcttgttctagtcttccagcccatgaccattattagtaaggagaggttctttctagggttgacagataaaatacaggatgcccagttaaatttgaatttcagataaacaacaaattatgtttttagtgtatgtatgaatttgaggcatacttatactaaaaaattatttacctgaaattcaaatttaattgaaaatcttgtttttatttgctaaagctcgaaaccctatctcttgtggagcaatgattactttttaataacattattggatttgagtacatgtgagtgtgagttttggatcaagcacactcagattcaaattctggctcctctgcttaatagctagaacagtttttttggtctcagaatttttatctattaaataggaataacagcaatacctcataaagctgatgagaatattaaatgaaaaaatatttgtacagtagttagtatagtgcctggctaaata

SEQ ID NO: 138828 - DNA, 1052 bp, Homo sapiens
aagtaacttaacttgaacggccattttgctcttgggaatccagaacactcttcactttactctcattttgctgcatcatcaaatcttaatagcaaatacttaggcctgtatttccctattgtacttacctccaaactatcatcaaatttcatgaacctgaagcagaagaccagaggtctagtccaagctctgccacttactagctcacttaacaagttgaccttgaccaactcattgacatgctcttggacttggcctcctcacctaaggtgtgttccttcttaatgttatattccatgattctgtgattttttttgagatatttgaccagctactgacactttgtatcttgctactaatcgtaacttatatattatcagttaattagtcaatccattctacaagccattatcaacccccaatggtggtctccaatcctgtgatacatacatatataatatggtttcaagggggtgtgtacagaaaaagatacttataaagcaattcatgaacaacacagaacaacatcaaattgagtgctacactgtatactctgaatactttaagaattgtggaaaggttgcactccagaaaagtagagttttcagagaaagcttgctagagaagctagccttgaaagatagataagttgtgggttgcaagagagaagggagatggggctttggagaggagaaaagagaacaaacaaacagcagggccaggaaggaacactgtgtgttcaggtagagccctgtctgactgagatacaaaatagcttgaatattctaattcataatttgccaaattttaataaatttcattttgtccaaacagtatacatgtactgtatacagcgtaatctagtgcatatcaatttcgttttcagaactgaactttgtaagtcaggcaacttctctcctgaaacattttaaaaacgaaatattggttccaccaacagtgtacctctcatttattcaaaagcagaagacacaattaatgaattttatcctcatctagtgtgacccttctctgctcattagctctctactaga

SEQ ID NO: 138829 - DNA, 1045 bp, Homo sapiens
ctccagtcctccttcctgatgagaggcagccttgtataatgaaaagatcccagatcttagagtcagacctaagttcaagtcttaactctgcaacttacaaactgtgtgacttaggttgggcaagcaggggttctcttttttatttcttcatttttaaggctgggaaaatgatttttgccttggaattcttgtcaattctcatctgattgttgtgaggagtgaatggaaacactctatgtataagtcctttgaaaacaggtactgacaaaacgcttttgaagcattaaaatgcatgtcttcctgagagaggggcagcacagtcaaccagtcctggttacctggtgtatcacataactgttctccttgagaggggaagatggtcccacaagaaagctaggaatatcagtggtgggtgctgccatcgggcttatgtggtggggacgaagggcccaggcaaagaaagctgtgacttcctcccccgactaccaaataaactgccagctctagcattttgccaacgactgatcctatgacatgagctcagagcaggaaggccggactgtagggaggaggtacggaagactcccttgaaatactgcgggtggcattcaccagctctcaaggaagagctccaagtttagggggacaggtggccagcggaggttttgaatctaccagaggaaattatcctccctctgtgtgcccaggataagatctcagagccagggaatgtttgtaaatggactctctcatttaaataaatcccacttaaatatttatcagatcatgaatatgcatgtttctctctctcagtgctggaaagagaacgggtgtgtaatttttagatggcacataaataatgtaagggggaaaaagggatctttgttctgtgttgactgtgtatttacagcatctcaagaggtcttgaaataatgaactgatttttccctttcccagtctaaatgtgcacttggagcttcacctgtcctgtctttagggtgatttgcacacatttgtatccccaggggaggatttctggaggcaa

SEQ ID NO: 138830 - DNA, 1035 bp, Homo sapiens
catattataatgaggcgctatctctactgaagttatttctaatttgccacaatgcttatatagaagatgaaataaatgagcttcaactgcagtaaggaaattgcaggcagttgtaagaagttcttgattttattccatagatattttgagagtgcatgtcaataaaaacaattagataatataattcagctgtgagctctcatgtagccacttgatgcggggtgcccaaaagttgtagaatcttctttcctttgcaacaaaatgaaagtgcaaactgtctggagggttaaggctgaggttatgagtaagcctgctttccataatggataaggttcaaaggcacctgatggactgtgactagaaattcagtagaatctttaatacctacagaaagatttttaaatcattgaagctgtttttccttccttcaggattttccatcctccaagcgattatggaagcagcagtgcaaaacaactggcaagtaacagcaaggtctgtgggaaacataaaggacgtccaagaattcaggcgcatcattgaagaaatggacaggaggcaggaaaagcgatacttgattgactgcgaagtcgaaaggattaacacaattttggaacaggtacgtttgagatttatttcaccgccagccaacatgttaaattatcaacctaagtcagctcccatatctgctaataaattaagtagccaacagactaaacgtgccaacagtttttgatagtctctctaatccttttttcctccccagtggctgcagaaaaaaaaaaaaaaaaagaaagaaagaaaagagaagaaaatctaagctgttgaaaattgcatgccatgattaatctggaagtatttgcaatttaatgctacctatcagataaacatatccctccacacctctgtttcatagacaactgactttcaaagtaatccccttcctttcccataccttcttcccaacagggaacagacaagggactaagcagtgcagatggaaagggtttttgtttcaggagcctcattgctgga

SEQ ID NO: 138831 - DNA, 1040 bp, Homo sapiens
catttatatgacttgtttaaatgtaaccctctgctcaatcctagtaagtggcagagcaaggataaaactcaagtcttctgattcctcatacagttctcttgcccctacactgcactacctcttttaatttgtaagttactcattaaataaatatttagccaatgccaaaacttggatttggcctgcttatcaggttaaatcttaaaacagttgcaaaacaattagagaagatccaaagaagagcagcaaaaatatgattaaagtgttagaaaatggggcctgtgaggaaaggctaaatgagttgggattgtttagcctggtgaaagagagccaagaggtagtttaatcaccttctcaagtataaagagttatcattaaaagggcactgaccaactgttctgcatgcctaaggacagtaccagagcaaatgagcttaactagactagagagagagtcagtattagaaatgactcattataaaacagagaggaaatgaagacagtaaaatctcaccagttcaggctatatgaaggtgaagccatactgaattagtgaaaagtcagacctagatatgtcttaacattgttttcaagaatatacaaatattccaaattaatcctgtgtgttgacaagtaaatatccttatagaagacttatttaataaatagacttatttaataaatagtattttctaatttgtctattcattatatatctaaaaggctgtccccttaaaaagatttacacattcctccttcagtcttaaccatgtttctctttattccatagaaaatttacagacaagtctcagcatatcctctgcctaaattatagcatgtgctaatctagtggggcccaaaccaatatgtttcaatgttctacctaaaatattatataatgtataatttccccttgagatattccaggctaaaatcacttcatcatggatgatgtgaaggtagcatttcttaaggacagattcctgaagcaggtcaatccttcaggtagatttcatttcagaaaccccggctgtcactttg

SEQ ID NO: 138832 - DNA, 1065 bp, Homo sapiens
cgagcttccagagtagatcaatacatggccaaacaacccactggccttccttcatctcttactgtattttagtaggtggttcccttttttcccctgcctccagccattccaggtgtctctctgtaagttggttgccttattcttccttttcaaggacactttttgttacctaaccaatcatggtgtccaaatcgtggtcactatttcttaatctaatgacatggcaatttgatgctattacttaacacttattgggctacctgaattaatatcttgaagcaataatgcaacccaaactacagaatggtgtcccaaaagcaaaacctatggttggatttcttaaagatgttcattggaaacatggtttcttaagtctaacctagtatctttaggccctaagcaagcgagactctacttgtggtaaaagccttcaacaacatatgttaggtgactttgacactcactgacagccttaaataaacttgttctataaatgcaaagatatttatcctaggagttagtagcagacatcaatattctatatttaggaattttatcttcagcttattaaaaaagatggcacaattctctggtcatacctcacactagactggctagactggctttgtgactgtttagaagcaaatcccctctgggaaaataaagagaaaaaaaaaactttttcaataacattactttgaaacagcaagactcttgtttatttcagatgatagaagctttagggtcaaaaaggaaatgttctacttaatcaacagttccctcctcccattaaacaaaaatctgataaatgtttgattatttcttgtcaggtttggggggttttatttttaaaataaacacaaattcaaattaattttcattagggaactttttgagagtcgttgggatgactgaagacaccttggggttttgtaaagcagagtacagaagccttgaggcaggagagctggattctagccccaagctgtatgagttcaaaaaatcaatctctctacatctccatttcctgaactgtaaaatgaatctatggaatatgatggtctt

SEQ ID NO: 138833 - DNA, 1095 bp, Homo sapiens
attaattgttcataaaagaagaatagtatattcaagctcaagtggtttagctgaaattgttttcatgcctttaattatctcaatagcagaaatcatagctctaggtataactggataattagtggggacagagaaaggaagaatgggatccctttcagagttcagcattgggccagaatgcgcctgctgagcttaagaatggggacacagaaaaaggataactaggtgaacggatttgcaaatcagaacctggggattatgctatctaaaagacatacacatttgcgaggtaaataagagaaaaaccaaaatagagtgtgacctcagtaatactctgtcttggattaagagataaggatctagagacactgaaacaatggactaggtagccaacgagggtactgtagaaagcttcttagtgggcacttttaagtaccttgccatcactatcttttgaacagctctgagggtccttttcagtcctcttgacctatttcaaactactacttgtgcttaacttgaaaacttcctactcaacaaattgttcctcctgcttcctttgaccaacataaaatcaattgttgtttgacagaatactttgttgctgttttctcaaaggtgcaaaggggaaaaaaacaccttatttttgcacacattaacttaatttcagtcttacctactcaagcacaacataatccttcaaactctgaccgaagccccttcaccatttggtgtccatggcaaccgccaccaagccactcagagagttgcaagcagtggcagaaaagtgcatctcccaacagagccattagctcttctgcattaaccccatcaataaaaggtggcagcaggcccagccctgcattttctttcatcagggaggaggaatgttgtccgtgtttccttcccagattgtgagaattgggtgtggctacatctcacacccaacctgttgaaaataaagcattgagggtaaattactgcaactaagtcagagaacgattttcacttgagaaaacttcccactggtatgcttccccaacgactctgtcaactgcagcctccaccacaacactgcttgctaaactacagcca

SEQ ID NO: 138834 - DNA, 1038 bp, Homo sapiens
ctttcatgtttgcatatgtcatatacagtaatcaacaacttattttttaggcatctacagtttctttagtttagaatctgttgcagtgatacatacaaaaatagaagattgagtctctgccttcaaaaaacctgttttaaaagatatgctttcaaaaaaattcaagaataacataagacagcaaacacctaagaattaaactgctgtggccctgtgtggcacctcatggtgtagagtgaagcagatataagaagtataggatattatgcctgctccacaagaattttcagtcaagtgagggagataagacataagaacacgaaaattaaaataagaaaacgagagttaaatagtgacatgtcacaaggcagtacaagttgtattataaggtagcaaaaacacactattaggaaaagaaagcagagtcggttgctctaagccaatgtgtctcagaagacaaaaggccagcaccctttctttaatttaccatcaagttaaagcactttagaacccactgaatgctaccacttttctaacctaagcattgataattcaattggttgtaaagatttaggacttgatattttcaccaaagaagtatattaagcgacaaataactgattaaagactgtctctaaaagtcatatatgttttcttttttttcttttttttcagagagctgatatagctgttgctccactcactataacattggtccgtgaagaagtcatagatttttcaaagccattcatgagcctgggcatctccatcatgataaagaagcctcagaaatcaaaaccaggcgtattctcatttctggatcccctggcttatgaaatctggatgtgcattgtctttgcttacattggagtcagcgtagttcttttcctagtcagcaggttcagtccttatgaatggcacttggaagacaacaatgaagaacctcgtgacccacaaagtcctcctgatcctccaaatgaatttggaatatttaacagtctttggttttccttgggtgcctttatgcagcaaggatgt

SEQ ID NO: 138835 - DNA, 1027 bp, Homo sapiens
ttttgagacaaaaaagctgtaggttttggtaaacttgaacattaatccagatactgaccagagtcaattatacaaacacattagggattttcatgtgaaatataaagactcagaagagtcctaccatgtttttacagcatacttcattttgagattatccacttggaccataaaacatttaaaaagaagctttgcagcataactaattggtaaccatattcagcagctttttaaaatagtctgtatggggtatgcctcatttatcgaagtcacactttttttggcttttctcaatctgcttgattacattctccaaattatttcactccctgttccttttgtgcttagaatgtatgtcattttttgtattatctgggagtttattttgctagtttctttattttttgaaatgttcacttcaagagactatggtttctgaatgatcctataattaaatgatttttaacatggctggtaatctatgttgagacaatactaaagagtcattaaggctcaagattttattggtttctgtaagtgaattttcagaactaagtttgtggtatccccattggagtgctgcatactactctgcatactcaaaaagcactcttctcatttttagaagaatttatatatatattgattcattaagtaataacttaaagattatggcctgaaaatgacaagttgaacaggtttgttaatgtcttatagtagaatgtaagctgtggctcttctttggcactgagatatatcaaatgctttttttcaaagtatgtattttattatactaaactagacactgtcataaagagcaatggctttcaaaattttttttaccatgacccacagtaagaagtaaattttccatcacaactcagtatacacatatgtatataaccaaaggttcaccatactttacccttacaatgtgcaatgcactccgatattttctattgtgtcattttttttttaattctggttacaattcaacccagaaatagggcacacaacctacagaata

SEQ ID NO: 138836 - DNA, 1022 bp, Homo sapiens
agacttagctaaacagactgaaattgcatatgggaccctggactccggttcaacaaaagaatttttcagagtaagtgctctgcagttaattgagcctgctgatatttattttatcatcttctcacaaaggcaagttcacagtgcttttaagggagagttgggaaagagtgggaatgttatcaaaggagagcatcttaaatactgggctgcttggttggtgatctactccattgtcgtttagaaccaagacttgagtaagacataacaagctgcatgtcaagggcactgagtttggactcccaggtttgaatcccaaccctgccacaaagtgattgtttgtccttgggcaagccatttaacttctaccagcttcagtcccctcacttgaataatgaggggattgaactaaataatatatattctgctttctagcttttacaaaagcagtgcttttatgtctcagaggttcacagaagttaggcaattgactctaagactgatgagtaatggactataagaaattacatattctattttaaatgttagttgtctattgagatgtattacaattgtatcaagtatttgtgtacatggtgataatttcattttcaggacagctgataattgttttaatttcttgggtagacgtattccctcagctcctcataggcaaaatcttattgaggaaacagtaaattgttcattagcaaaagttaataaagctatgtaaagtctgtcaagaggaaagatgaaaggagattgaagcaggaaatgatagaaggataatatgagggacaaaccactttcacataaaccatcaagatctttattctgtggtaactggactattaaggaagaatactagtagagtttttaagaactaaaatgttttttcagttaccccaacaagaaaaatatgctaatttagattagaaaatggacacattctataatattactactgcctgctactgtaaccacagtaactagttgtagcaatgatccagaagccacttgggtag

SEQ ID NO: 138837 - DNA, 1044 bp, Homo sapiens
ttaaataaaataaaataaacctaaagactctccagacacagttctgtagagatgtgaggggtacttcacaaaaataaaataagataatctctctgctttcttgatggaagagatgtgggtttgttttttgtttttgtttgtttgtttgtttgtttttctggctttgggaagagaaagaaagctcattcaatattttccccatcctcttgatcccacttctacccttaaatataaaatattactattgtgctcatctcctagttgattcatctttagctattcctttgtggcctgcagattcaacaacttcaatatgcacaatttagagctgcccttgaagaccatctagaaactttaggtgcttccaaggtggcctgccggccatctgcccaaagtaaccaaccatatggattttattaaactatctccattagtcctccaaggtaacctacttgtttatgagagcgtttcacagcccagaaagcctaagggggttaagtctccattctttctgaggctgccaactctcacagacagcatcagggtaattaacatcacacaggacccccagatctttgtaagaactctgaaactctgtttcctagaagaactcatctaaggatctcactttcttttcttatctgacacagtcaaatcatctaatagccttccagttaaaggaatgaggcccatctcttcaattagactttacttgagttcacctggcaagcctgtgtaggttaattatttacagtcctccttcatgcagaagcctaaaaacttgaccgtaaggatcaagtaaaattcgacttacgaaaactcaactaacaaggacaattaactggaatgcttggttgcactccacttttgaaaggaaaaggcaacttagacacacaaaaacttgataagaattttttccccaaaagcctactagatgatgtcctgcagtcagattcattctagtcttcaacatcattcacactttggtcagagagtaaatgtattgaatgtttatcatagcaatttaggcaccaggtatacagt

SEQ ID NO: 138838 - DNA, 1049 bp, Homo sapiens
attccatggagttaaataagacggtaaattatggtttcatctatttaatgcatccattttttttaatgttctctctctgtgttgtcctctctgactgtttgttgctgttttaattttacagttcaacggctttttcaatttaaatggtaaaagccaagttatggtgccatatgtgacgaatgttaattgcatggatgtggtgttcttgttactttttttctcaaagacaatttccccatcccgcacacttcagttttgagcaaatgttatcctccatgccaccttccaatatttaaccctgtatttgctgtacagacatttttatagctccacgttctgtgaaatttagccaatttgtcctcttgtgctcctttttatacgttaacgatttcctaagcatttgtgcattttcttacaagttatgttttatcgtttcaagaaatgctgttaacctggcagtattaaaactgaatgagcaaggcctcttggacaaattgaaaaacaaatggtggtacgacaaaggagagtgcggcagcgggggcggtgactccaaggtcagcctcaatgtcaccacaaccgggtacccttagtgacgagtaatcggcaagactgttatcttattattgaggagagagcacaagactcacacataaagtggaatgaccaggttattcccctgcctggcagctttgggaaccaaaaagactttagggcactgcccacatttttgatctaacttgggtcccttcttcaactcccagacagaggctccaaccacaccctttcccttcctttacccaccagtttggttgccttatgaaagccatgatgtgggtttcaatgccctaggctttcaagagtccaaggctttcctgtgagactgtccccgcctgcctcagttgagtggtatgaaaaatcagatccatctactgaaaaatcagggcatagccttttgttttctaggttgtgatggttgctcacagaggttggttggttgagtaagggtggcttcttcaattatgtgtctgagtgatgagatgttgttctct

SEQ ID NO: 138839 - DNA, 5886 bp, Homo sapiens
caggctggtattgaactcatgggctcaagtaatcctcctgcctctgcctctcaaagtggtacgattacacatgtgagccaccaccgccagcaaaatgcaccttcttaacctcacacaatatttcaaaattttaaaaatctgtttgtttttaaaaatcagaattgacaaaatccaaatttcagtttttcttgaaggattggaacatctggtaacattgtgttctgatttctgcatagcatcattatgtcctgatttcagctagacttgtctaggtgctgcccccctttagaatagagcaagggcctttttaaaaacagttcacctccgtcagtccccactcagctcgtttcttttgttttcatcacgttcttggcctttgtagacaattgattttgtaattccagctctaagcctttttttgtttgtttgttttcccttcagttcatacttggaaactgacctcctaagctcctgaagatttcttgttttaggaatgcattgccattctgaggcttattcctagatgttgacgataggtattggtaaagggtatgggatagggaactcatcaatgttcacattgatgccagagaaacatttaatatctctgtataagtgcaacattgactttttttgccaccaaacacaccattttataggaagggaacctatactgattaaaagagcttgcttatttgctgcagcatattttttgagggcagatttaatatgctctcattttggtctgtatgtagtaaccattaaatgtatactagactcttgtaaggagcttgaaatgacagacacaaatcatttctgtcttcattatcaacttttatacttaaaaaaaatactgagtataggttttgtgcactgatattcataggcatgaaaagttgaagagggcaggagaaattttctatttccttgctcttccacttacggtagagcaaatattcatttatatgctgttttttaaaattttgacatgggcatgagcacttataaaaggcttccatacaacatttgccctgagtgtgtctttcccctacacacataattatcctgaaaagcatccctgggtgcagttaagtttcagctcaacagaatccacgtcttaactctgttacattttatccacgtggaacatctcaggaactctgtttgctataaagaattcctaggttgcagtataagggtaaatgaaggagtaaagtggatttaggatggctgtccccatgtctttctcataacttctttcttccttataaatatttgtttgactttttaaatgtcaagttcatctttatatgcctttctacctggggtttatgtgaaaagaacgagagaatgagaataaaatcctgacagtttcagacactagtaaaaatgcatggaatgcagttctgggatgcttcctgtgaagtgaagacacttaaccaaaaataatatattattttggtgggcttgattttatagtttctcttaaaaattgtttggttgccatccagagggctcttttatgaagaatctatataaactactaaaacatttcttaggacctttttggtgaatttgatcataaaattaaaaagcgtgtatgtgttttataaaggcatacctctgttaagaaggctggttttatgtttgccttttcttctctactttgatcaccaccctagctgttcctttctccagaccaccttacttttcaaacttgattcttgctatcacagctctctgtaacatcagttaaaatcagctgcctcaactctttgaggatgtttgtgcataggacggcattgtgaaacatagggaaatggcagtcttactaacaaaacaggacctatctctggccaaaaagaaaaaaaaaaaacaaacaactcaggaggtccagataattaccaatataaaatggcgttcacacatataatcttgtctcagcagagtaggaaggccatcttctgttgagatgtgtcctacaaatgtggtatgtgatattaccaatacagcttatagcaccaataggtgtctgtgatggagaacagcagactatgaactgagcctggagtagaaaatttttgagaagcagcaacagtcctagatgtgaaaaagatagatctgtgtgatcccttacattcagaacttacactttcttatttacaatggttaaagcagtacatattaaaaaatagttaataaaacacttaggagaatgttgcaggtaatgtggtataaatgttaataagaagaaaaatactgctttgctgaaaatagagtcctgaaggctgagtttggcactgcttcatcactatgcaactttcttcttgatgacagctagctctttctgaagttcagtaaacttgggggcagttttcaagtttgtaatcctaacacctcagcattattttattaaaatactctgtggacactgccaagagactgacatccagtatcttctttccacttgctcttgtggttgctgatttgtcattccaggctatggacagaccccctaagccgaaagtctcccagaggaggatgccaaagctccgtgcgtcactctcagaatgatatctcccataattaagagcttctggtgctgtccatttaatgggaatctgctttaagtcagaagatgagtacacaccaccatcctcttgacgagacattccaaagtcactgattttcagaacattattttcacctccaggcagtttcttacagcaaggtccctgtgtatacattttttactcgagatacaccatccagaatcagcatctaatgaaaatttcactgagttttagttcattcttctttctctgaaaggagaggaaatcgcctccaggaaccagttccttaatgacgtagataggccgtctttgtgtgtgaactcctatacttttgacattactgggatgattatattgcttgaggattttggcttctagtaaaaattttaatttcagttcctggggaagacgttcttgacgtgttttaacagcaacagcaattttatcctttaatgtgaccttaaatgtgtcaccaaaatttcccttgcctcttgtaacgtggcacctttatgattgagaacccatttcttattctcctaatggccatactgtgataccatgatgctcttaattggaacattgactttttttttttttgcaatttaaacaattgagataaaattcatataacatcaaatttacctttcacttttttttttttcttttggagaccaagtctcgctgttgtctcccaggctggagtgcagtggcgcgatctcggctcactgtgacctccgcctcctgggttcaagcaattctccttcctcagcctcctgagtagctgggactacaggcgtgcaccaccacgcctggctaatttttgtatttttagtagagataggggtttcaccgtgttagccaggatggtctcgatctcctgacctggtgatccacctgcctcggcctcccaaagtgttgggattataagcgtgagccatgacgcctggcctcaaacttgccatttttaaagtgtacaattcaatggtttttagtatatccactatgttgtgcaagcatcaccgctgtctaattccagagcatttctgtcaccccaaaaagaaactccatgcctattagcagtcactcccagttcttcccttcctcggcccctggaaaccagtaatgtactttctgtctctgtgattttgcctgttttggacatttcatttaaatggaattatgcaataatttgtggccttttgtgtttggctttcacttagcatcatgttctcaaggctcatccatgttgtggcatgtatcagtactgcattcctttttatggctaaatgatgtttcattgtatgagtgtgtaccacattttatttatccattcagcaattaatggacaggaacaatggcttttaagtattaaattgtaagttcaacattaaatgtatccacagttattgataatatcaagattatacatggtgtgaacagaatgctgtgtcgaaatggtatgtaaattatttgtcagcatttcatgtaagtgattattttctaaggacccttctagccctggttttaagaaatatgtgaatgtagtattttcatcaataaagtttaatgcattaagcattagcttaaaatttgaatgaaggcagatgtgaagatatttgccacatgttgtaataatcatgttttgaaattatttcaatatgaagtatttgaaaaatgtcaatacataaaggaaaggaaatgagtataattaagtcaatatatttttaaagcaatttttataatttagcagacactgcatcttaatataagttactattaaaattgtgtccttgtgaaaaatgtgatgtcattttcctttttttgttgatcatgtaaaataggttacttttctttgctacattttctatttaataagctattgcttgccgttgtggaatgttttacttgttgctccatttttttctccctacccccacccctctctcccacacgcacacaatgttcaattttttttttaagtcatcattagtgtgtttatctttaatggattctaagaatggacaaaaagaaacacacaaatatttcatccttttctggggactcaagtctttgttaccgatggaactcattaacttcttgttctttcttaaatcttcctccctccttaccttttcctctccttccttctcttcttcttcctttcttctcccctccctccctccctcccttcttccctccctcctcctttcattctccttctctccttctcccttccttttctcctacctcctttgactaagcctccctcccctactccctcctttccttccttccttccttcttctctatcaatataatcactttgtttctttcaggtgagatcggactggaactgttcggctgcgaccagaaatttattttcctgagtaaattgccgagaattaagaatgaagagggccatttgcatctccttaaattattcagttacctgctttattgctccatgtggaaaacttaaaattgttaagttgtgcattactgtattttaacttgttgcttagtttctacatgtttattttcagtaatggctgaaagtgttaactgttccatacttttagcacaatgtgctgcataaggttacctgtgtacagagttttactttagattaactaaatattgcctgggttcagtttttatttccattctgaaatgcttcctttttattgtttgaaactgaaaataaacaattgttgaacccttttgattttacctcattttaaaactgttttaatttattatttggcttgttcttaatattagtcactaaaagcagtgggagcattgtcttatgaaatgcttaggaatcattttatatagtacatgtacaacattaaacgtgtttaaaaaagaaaaaggtaccagcgatcacttgtcccttgccattttttcttgtaattatgttagacaaatcttggcggcggggggatcaaaacataattgttttaattctacagctgtaggagctttgtattgctgaactttcatctggaaaagtttcacagtgacatttttaaaagagaatttttttatctgccgaattctaccagtgtaaccttttttctaaataaacaatagttttctcaaatggttgtatattattgtgtatattgttgcttattcagaataacttagcaaagataattcattaaggttcctagcccttctcagttcttattccatgggctacattattttccagtgacatatcatccaataataggaaaatatcctgtttgattacctctgtagttggagtaaacagtggacttggtagcatgcctggatttttcca

SEQ ID NO: 138840 - DNA, 2872 bp, Homo sapiens
agaaacaatatccttttcattttgatgttttcagttagtgtagtagaaagctttgatactggtcatgtttacaattgtactcttttagtatgtggtttatatgcttaagggctgattagttttgaaatggtctttccagttaactctcaaaatgtgtgaaatctggaagtgggatacttgatgttcttgatatttaaaaatacttctgtggtgactgagatgttttatgccactaagggatttatagtctttcaggttatattatcacagagaggaagaaagggaacagagagtccctagggctggggacattgggaatagaagggcaaaatgatgagtcagacaagcagagctggtagagtttgaggctaccaggctggtcagagcccatttaggcctgcaacctgaggtgctgtactaaaaggggagatgctgttctttccgccattcccaaaagttgttttcccttaatttgtcatctactcataagtcctcggacaagcacagataatgaagactttccatcaaggtgagtgttctctcaccaccttttcacttaatgatagaaacataaaatgagttctgataatgttgaaaaactagatgcattttacaagctacaactacttgtttttttcacctaaatataacgaccaagtcttcgggtatagatgcaaaacaagattcagagttatttttaagctgttttcattttaagcttgctgattagccacacattttttttttaagcaccaagatatatttaagaacatctggctttctcttcaccacttattcccatcttctctggataattaattatgtttttaaagtccttattgccttgtaaatggtggtagtggtatctgcattttataagtgaagaaacagactctgagaggttaagttgaagagggtcataaagatattagtcaacagagccagttgactatcctcagtctttctatcctttagtgttctctgttccttttgctttctcatgctgatgtcttatccaaagatttttaagttttcgtgccattttttttttttttaccactgcccatgttttgcaacagaaaatatggtctgtgtttttagttctggaatttacaatgtgtaactttttttttctttttttttctttttttaggtaatgcacttaatgctttatgtgagatttaaaaagtattttacccatcttaaataaattgtgtttccatcatagtggatacagtgttcagaccctaacatcgccttttttgagcacttaagataatctgaatagttactgtttggtgatgccttagtattattgaagtacgtaggacaatttgccccctaaatgtaatggttccagacagctgtgttttgaggctgttgattctgcctttatttttttatttttatttttttttgagacagagtctcactctgtcgcccaggctggagtgcagtggcgcgatctcagctcactgcaacctctgccgcccaggtccaagcgattctcctgcctcagcctcctgagtagctgggattagaggcgcctgccaccgcgcccggctaatttttgtatttttagtagagatggggtttcaccatgttggctaggctggtcttgaactcttgacctcgtgatccacctgcctcagcctcccgaagtgctgggattacatgtgtgagccactgtgcctggccgactctgcttttttatagcccgttttcttgcttccatgttagccatcatttcttaatatattaagtatacttgcttttctatacttcgttaatatattaattaattaagtatccttgcttgtctatacctcccccctaatattattggatgcttctaatcttttatgagaccagatagataaccaaggctgtttaccagtgtttaaattacaagtgagaaatgtctgagagccagttctgtataagggtatgggcttaaaggtatggattttgtcatctttattttggctgcaaagcagggattcgagaggttgccttatagtcaacacatgatgaatggtgtgcttttcctgcttttttggtgcttgctatgtaagtagattagggtaaagtagggtaaatgagagttataaaagaacatttcgaatttaatagatttaaaaggaaatattactgctaattcttcaattctagctgctcctacccccatcccaaccttacaactatcttctctggtgagccataaactcttaatcctcattttaacctttcttttaatctggcattttgctgtcacatgtggtctccctattaaaagaaaaacaaaaagcccacctttcatatcttcatgaggaatgagccagccattgtcactgacaactttcacagtgattttatatatctctgtttactcagtacccaaatattattcttttgtatgtgaaggttatgctacagatttgagtttttcttgcactgaccatgaatttgtattttacccctctgtgtaatctcttaggaacaaagggatgacaaaactggtcagggttagatatttggctcgtggtcttatagcaaaacttctagattcagatgttcttttaaaagtatgtctagctggatgtccatcctgttgaattcctcattgacaactttgtacgatactttcttcttgggtagactcttaattttgtgagactctggttgatagtttcttttcttttgagacaaagaagtctcgctgttttgcccaggctggagtgtaatggtgcgatcttggatcactgcaacctctgccttccaggtgattctcctggtgattcttcaagagattctcctgcctcatcctcctgagtagctgggattacaggcacgcaccaccatacctggctaa

SEQ ID NO: 138841 - DNA, 1171 bp, Homo sapiens
gtgaatctcacgcatctgccataaagtaataagcaagccattactaaagtataaattgtttccaaaacattgttatatatattgaaaatatatgccatttattcatagttcataaaaacagctctagaaaattatataatgaacattttaattctatgctttaaaagataggctgttcttttaggtgttttttaattgaggtaaaattcaaataacataaaattaatcattttacaggtgtacatttaagtgacatttagtatattcacagtattgtgtaatcatctctatctagttccaaaacatttttatcacctccaagagaaaactctatacccatttaaacagtcactcccatttccccttctcagcccctgggaaccataaatctgttttctttatggattcactcattctgaatattttatataaatgaaatagtacaataatgtgcccttttgtgtctgatgtctttcacttagcataatgtttttgaagttcttccatgttgtagcatgtgtcatttacttcatttctttttatagctaagtaatatttcattatatgaatataccacatttgtttatccatttttcagttgatggacttttgaattgtttccacgttttggctattgtgaatagtgctgctgtgaacatttgtgtggggctataagtatttgttcaaacacctatttttaattatcttggatatatgcccaagaatggaatttctgggttatatggtaattctatgtttaactttttgaggaaccaccaaaatcttttagacagtggctgtacagtttacatttctaccaacaaagtatcagagtgcagatttctctacatctttgtcaacactggttattttctgtttttgttttttattatagccattccagtaagtgtgaagtggtgtctcattgtggttttgatttgcattttcttaataactaatgatgctgaacatcttttcatgtgcttattggccatttgtttatctttcaagaaatctgttcagataccttgaccattttttattttgagggtttgtgtttttgttgctcagttgtaagagttctttatgtactttggatactagatccttatgagataggtgatttgcaaattttttctccagttctataggttgtcttttcactttcttg

SEQ ID NO: 138842 - DNA, 1486 bp, Homo sapiens
gcctatcggtggatggtaagactatttaaaatttccatgattgtgtagaggtgtttttttctttttctttttttttttaaacagtagagaaactccagtcactattgttcatatatggactcttgtaatggtggttataggtctttacaatagagctataaggaatactctagcttgtgaatttactaatgagtctcagttgaggcacaaatgaactgatggagtttaaatggtgatttttataaggccaagaattgaagcctttgtataatttgtgccatgcccttttattttacctcttgtaatccagatagctgaccagtttttactttgggtataattcccaattgtgtttcatttagtaaacaaacaagtgatgccaatactggaaaactaataatctttagtaatattgccttaatttaacagctctacattaatcatactcctccaccactgtccaagagtaaggagagagaaatggacaagaaagatttggacaagtcaagggaaagatccagagaaagagagaaaaaagatgaaaaggacaggaaagagcggaaaagggtttgtaaaattttttttaaactagtttggaaagctcattatcatgtacaccagtgtgtatgttgccttttaaaaaatactagtttgttccatagtagtctgttatttcatgattttattgatatttttaccctgaagtgtttgcattttctacgttaataaggatcttcagcctagtaatctctgtcagctctgcttgtctttcatgccattttaccaagtatgtgaaactactgcaaatactctccattgctagttagctgtgcccttctcatataaaagtaatactttaaaacaaaaacagaagcccttggtcaatgtagttcacaattcttggttctaggatcactcaaacaacgaccgtgaagtgccaccggacttaaccaagagacgtaaagaggagaatggaacaagtaggtagacttattcatatctttgaagatatcatcgaagtgaattggaaaaggctttcatgattttcttttgtaattttagtgggggtttcaaaacataaaagtgaaagtccttgtgaatctccttatccaaatgagaaagacaaggaaaaaaataagtcaaaatcttcaggcaaagaaaaaggcagtgattcatttaaatctgagaagatggataaaatctcctccggtggcaaaaaggtaaattaggaaaataaaggaataatatgctttatcttaaaaaaatcaatcctgaaaatttagcaaatattgaatttttttcctagtcctatagtcttttgttcattatttaggagtgggaagaagaggtattgagggagggcattccgtttggggaatttgagtcagttcagtcccagattaccaggagggtagagttagtatacctctgagattcctttcccctctccattccattcccacctacttctgttgattgagtttca

SEQ ID NO: 138843 - DNA, 2066 bp, Homo sapiens
tctgtcagttcaccctttacccctaatttccaaatagtgtatttctagttttgatcaattgtgttttgatgtagcaattctagcagctacttttgatgaagatagtgttaaaaaaaaaaaaacaaaaaacaggttccattaatcagcctctctctaatttaggagggcatcagtaaccacctcaagacagaatttagctttcaatttgttcaccatcttaaaatgaggatttacagccaaacccaagcctaaaagtgaggccatctttatataatatagtgaagctttaataaagtcagtggagcagagttttctgaaacagattttgaaaatcagtcaaattcttttttggaccttaatgatccgaatgtcaagaataaaagccaatcaagaacaaaacccagcgatgctacatacaaatccatttaatgaatccttaattttatttgtcaaacttgtattgagtattcactgtgtgtacaaggaactaggaagtatgtaaaagtagaaaggcaccttagctcttctaccatactggaaactgttatggacaaaaatgtatgacatgaagttaatagggagcacttgtcctaaaaaaaaggtaaatataaaataatgtaaagtgagttgcagagttgagggatggttgagtgctgttgactttggccatctttgaaggctaagtaggattttaagaagttaagataaaaatgaacaaccattctagtaatgagaactgctggaaaggacagatgttagggagcagtgatagccacagcatagaatgcattgggttactatagcaggatataattgtgaaaagatggtggagagtttggaatgcctaaactaaggggtatgcatttaattcattaggcaatgagaaactctgtttttatgcaaaagagtatttgatcagaactattctaaagaaggaattgaattgggtacattctgaactaagaatttctgattgtcagttgagctatgtgactttttatgtcaagaatgaagtatttgaacattaatgccagaagtaagttctagaaaaatttctcaattcctcacagtacagaaagtaagcacagttcaaaacttcattattaataagggttgtgtgtgtgtgtgtgtgtgtgtgtatttttttttttgcttttattgggaaaaattactacttagagaagtcttctttgagtattgcagcaatatttcctttgtcttaatcattttcataaataatgttaagatatgaataaacctcacgattagaaaaatcttgatgtcatttaaggcattctagccagcaagagtatcttttagacaagtatttttatgactatcgttctcttgctctttattaataagcattttgtctatttcagtttatcaacttttaaacattgaaattttaaagaatctacttctgcattgctatggcagtatttctgagccaactgaattgaaaatgtttggtggtgttaaaaaataagtgtttaattctcaaactgatggttttcatttttcatgtattcctttgaataccaaaggatttcttcatgtaaaaatatttgacttttgactcactattctatttgttcctaaggtgtatctagcattgtgtagttatgtaatgagttatattcagtattctgctgcataatacttttaatgtcttaaattaaacataggcttgtagcacagatataaatgccgtaaggttaggtatctgattatttcctgactacttcctaaatattttatgttacagcatatttccatatttacaactcacctaagaagggttatctctcaattatttagttagaatatccttgatgattggctgttttattgcgtatagcccttttggcagagaaagaataggcagaggagaatattggttcattattttttagtcttttgaattgtttagtcatcctcagctgactagatggctttctgaggtatttagaaccaggaagacaaatttcacagttaattgtgattattttgatagaaattggagtgctttcagaagtagagaacatgcagcctttacatttgta

SEQ ID NO: 138844 - DNA, 3244 bp, Homo sapiens
atttgtttatgatttactggataaagaaatacttccttttttcgagaaggagtcttgctctgtcacccaggctggagtgcagtggtgtgattttggctcactgcaacctctgcctcccaggttcaagtgattctcttgcctcagcctccagagtagctgggattacaggtgcccgccaccatgcgcagctaagttttttgtatttttagtagagacggggtttcaccatgttgaccaggctggtctcgaactcctgacctcaagtgatccaccctcctcagcctcccagagtgctgggattacaggcgtgagccactgcacccgaccattacttcttcctttttccttgtcttaaagttgtcctttagttttcaaaggactcccccttagttctagtatttttgaagttagtaagaaaccctttatgatatattttatcatatatcaaaggatatattttatgattatttgtgttaaaatcccatgtttttattcttaagcaacaaagctgttaaagaaaatgacaaagaaaaagggaaagagaaagaaaaagagaaaaaagaaaagactccagctactactccagaggccagggtacttggtaaagatggtaaagaaaaaccaaaggaagagcggccaaataaagatgaaaaagcaagagagaccaaggaaagaacgccgaagtctgacaaagagaaagaaaaattcaagaaggaagaaaaagctaaagatgagaaatttaagaccactgtccccaacgcagaatcaaaatcaactcaagaaagggaaagagagaaggagccatccagagaaagagatatagcaaaggaaatgaaatcaaaggaaaatgttaaaggaggagaaaaaacaccagtttctgggtccttgaaatcacctgttcccagatcagatattccagagcctgaaaggggcaagtttacctttctttatacgttcttacgttttgttattttaatgtatagttggttattgtctccttgttttggtaagttatataggggttttgctaggggaacttgtcatacaagttggtgtttttttttaagtgtttggaaaactagaaatgtaccttattctgactatttctttttgtcttaacagaacaaaaacgccgcaaaattgatactcacccttctccatcacattcctccacagtaaaggttagtatagcctgaggaaggcagcgtccatgttaggctcacctgtttggaataccagtgtcctgacttccttcaagtcttatgccaagcattcactggagccactggaggttttatattgcattagaaaatgaatttttctatattggtggactgattttttttcctattgagtatttttattataaaaatgttaaaacttcaaggacttagcactaattttgtagtgtttcaaagtgcaagagaaattttacccagaagtgcctcaactgctttaagcagtcttttttggagtgcaatggtagctacaagcaaacgaatcttttcagcagaatgaagcctatttttcagcatattgaagaatatatagcactgaagacttcctggatgacacaagataaacaagttacctctgaattcaagcttcttgatgagcatcataccgatgtgtgccttctaagaaggagtcttgaaaggagttccattttaaagtctccttggtgatcagttctcctgtagttgtgtatattcagtgagcatgcagcttctgttgtatcttcccttggaggtttgtttatacccattgggttcccaacaagttgaaccttgcgttacgataaaagcagatgtggcatccaatcctaccacccagcaaagagaaaccccaggcattcaactgcagcacaaaatcgtgggtgtagccttcttgaagactcagggtagccattccttgctccatatttaattttaattctaaagtcatctaatttcatggaatctttgaatttgcagtacgttgaacttttaaaaaactgtaagttattaattgttcatcaagagcactgtggtggaatatcgtagttgatttctttttctttctttttttttaatgctttctttgtgtgtgggaggtgtgagattcaccatgataggcactttgcagaaaaaaaaagtgattactcttatatattttgttttcttgttaatacaatgccactgaatttttcagctaggatgtgtatattcatattagagttaaaaataaagtaaaatgtgaatcctcccaattaaagaagaactatgaaaaatataaggcaatgttgttcttccacagtgacctccagtattttaaattttttgtggagaaaaaaatgttttgctttcttaaacctcttaactatagcttaagtagagagatatgaacaatgtggcattgacatttatttttaaattctgagcagagaaagatttttatttcttacattgagtacatttaatttagtttttaacattccaattccattacatgtttttttttattgttgatattcatattgataatgacatcatgaaatttatcctcacaagaagtagctggtttatttccaggttacagccatacttcccaaagttcctctgggttctgagaactatgccagctcacctgtcatctccattcattttctacaggacagtctcatcgaactcaaggaatcttcagcaaaggtttgagtcttttaaaatcatcatgcctaagtaaaccaaatgttctttacttattttatttagtagatgtcctcaccctagtacattcagtaagctgagatcagtgggataaagtactctgcttacattgaataaccttcaaaaatattaaatgttaaaactgaaacaacagatgacagtggtcccttttaatgagattgttataaaatgtgtgtaatgtggcaacatttctatcatctctccttgcttgctgtgttataccttctccttttatgctttttcaaaatctggaaataagtttaacattcggggaagaggttatttgattgttttgggtttatttaatttttcaaaacaaatctgccaggctgtctgactgtttagacaacccaaaataccaaaaaataaatttgatgcattcacatatctgttttaaaaatggaactcatctcaatctataaaaattctttatatatcctctgctgaggtacctttttggtagttacagcacaatatcaggagatactgttaatgtgaaagaatcattcccctggaca

SEQ ID NO: 138845 - DNA, 5280 bp, Homo sapiens
gggccaggagtttggtgactaggtggaggttatgattaatcaaaaattatttgagtgtccttttctactgacgactatgctagtaacttaaagtgattcatgtgactctaatagcaagagcagtagttctcaagaggagagttctttaggagaagactattgagaagccgagtcttgaaatggacaggccttgaaggtagattaggtttggaaatatggaagcagatagggaggtcaccatagggttccagcaaagacaggaagtagattgaggtttagggagaccacttttactgattcactttcatgtagtgaatgtacttagtgattcatatgaatagttatgatggggccagattatgtaggcattggaagtcagggagaaaagtagacttggtaaaattgagagctattttagattcctgagcaggatagtaatgtaaaaaatggtacttaaaaaagattactcatgacagcagtatgaaagatgctttttgactagcattaggctaaagaccagctaggtggctttttgggcagtctattgtgagagcatagactgatggaggtagtggcagtgtacaaggcttgtaaaccagtcttgatataaaggagagggaagagtcaaagatgacaccatgcctgagactaatagtgtcagtgttgcaaatgtagcctgttctgatggtgtatgaagatgccatgacagtgttatgagtgtgttgaatggagataaaagtagcacgttcaagtggacctatattcatgttaaagtagttataaactatcagcctttatctctttaaacttttcaattaaaagaagaaaggtaatgtgcatatagttagaaaagtgtctaattgaattctttgtagcccccaaataaaaagaaaaaagagaaggagcgctgtactgcccttcaggacaagcttcttgaagaagaaaagaaacagatggaacatgtacagagagttctacagagattgaaactggaaaaggacaactggcttttagcaagtaagttgttggaattgttaggttcctgatgctggtaaattacagaaaacaaaacattataactttagaggtgttaaagtgtattatgtttgtatttcaactcagtgttccctatcccattctttggttatttgttaatgcagaatcaacttcatgttcactggaggaactgatatagtttgctggtgaagttaattaacttttaactacatattggcagcttgtcattcagcttttctgtataaaacatatttctggagaaatcatagaaaaaaaggtccacatagtaaaaatgataatcatgaccaggcatgacatttggttacaaactataaatagtttgtggtttatagtattctcttcactaaaggtaatatgttgtcatgtttagtggctttgaggcacttggggaagaagtttaccacttaatatattcttcctttatttttagaatctaccaaaaatgagaccatcacaaaatttctacagctgtgtatatttcctcgatgtattttttcagcaattgatgctgtttactgtgctcgttttgttgaattggtacatcaacagaaaactccaaatttttccacacttctttgctatgatcgagtaagtttttattgcaacctttaaaaagttctcacacaaagatagctaacattataatttatagaggtattattgtgtgtttagttaaaaagcatgaactcaagaaccaagtgtctgaacttgaatcctagctctactactttctagctgtatgatctttggcaagttatttaacctctctgtgcctgttttcttatctgtaaagcataagtacctgcttcataagattgttgtgaggattaaatgaatcactacacataaaaagtacctgatatgtaataggcactcaaggttaaactattaactaagtatttgagtttacgtgttgtatcataataggtagaactctcttctccattcttaaccttcacttctcaaaaaaaaaaaaaaagacaaaaaagtttacaccttcacacacatataaaagcagggaagcttttcagtatggtcatatgcacattttgcatttagcttttttcttattactacattttgtggtttaaaaacataatgtggccgggtgcggtggctcatgcctgtaatcccagtacttcgggaggccgaggcgggtggatcacaaggtcaggagatcgagaccatcctggctaacatggtgaaaccccgtctctactaaaaaaaaaaatacaaaaaaattagccgggtgtggtggtgggtgcctgtagtcccagctactcaggaggctgaggcaggagaatggtgtgaacctgagacgcggagcttgcagtgagcctagatcacaccacggccctccagcctgggtgacagagtaagactcagtctcaaaacaaaacaaaacaaaacaaaaaacataatgtatgttccagtatgtcagctgcatatttttaatttctatcagcatttcctctgcttactctccccgtaaacccagtaatatgtatggctaagtggttaagaaactattatgtaataaaaaaaaaacaacttattatgtaataataatgataaatttttttttccttgtcactgtaaatcagctttctttataaaagttcttgttttgggtggttgttttatgaatgcattatttccccacaaaagccaaaatctccaaagttctctgcagtgtcattatataaagggaatatacattttgactaggcttacctgtttattatgacttgctgtaagagaatcttctaatatttttaactgattttgaccttgatttgtttatattttttaaacatttttctcctgtaggttttctctgacataatttacacagttgcaagctgtactgaaaatgaagccagtcgatacggaaggtttctttgctgcatgttagagactgtgaccaggtggcatagtgatagagccacatatgaaaaggtatgactaataaaaacccttatattttacccatgtatataatgaccacatccattaatatctagatagttgagttttaaaagagaagctgagtttaagattcagttgtaaaactgtgtttataagcacaattaatttgttattaaaatgtgctatgtacttttttattctatctcaaactgacattccaaattagtatctttgtataagttgaactttttgtgactacctatccaaatacgcatgatgtttttacacggaaacattgatctagtctacttaagtttcaatttctgctattttgtggatcataatttttctttaaaagtgacaaacattgtttccttaggaatgtggaaactatccaggattccttaccatattacgggcaactggatttgatggtggaaataaggctgatcaattagactatgaaaattttcgacatgttgtacataaatggcattacaaactaaccaaggtaaaaaaaaaattggatttttcaaaggcaaatttttctctgtatacttgtgcttttataataatggatctgaaaatgtttgttgtaggcatcggtacattgccttgaaacaggcgaatatactcacatcaggaatatcttgattgtgctaacaaaaatacttccttggtacccaaaagttttgaatctgggtcaagctttggaaagaagagtacacaaaatctgccaagaagaaaaagagaagaggccagatctatatgcattggctatggggtaacaaaattatattttaatgtgatttacaagactagatgacagaaggattctgaagactttaaaatgttttacagtgttgaagtttatcttctgccttcaggagattatgggagattatgcgatcatgtttccacaggctggtgagagttaccacttctgattatcaacttccggtctatactggatgatagtttttttaaagtcatgtataatatttcttgattgggaggaaatataattttatcatcatagttaacagatcttcaagagtaaaaaaaaaaagccatcttagtttaaggattagtttatagtgaaattgtaatttttaagaaagctgggcgttctataaaaaccttcaagaacttattaaaaattggtattttttaattctctagaaccacatagtagaatgaataacttgctaattttattcttaaaaacctcatgtttatgttttttgatttgtgtttgtatatttaaacactttgtgcgactttcagctactctgggcagttgaaaagtagaaagtcatacatgatacctgaaaatgagtttcatcacaaagacccccctccgaggaatgcagttgccagtgtgcaaaatgggcctggtggtgggccttcttcatcatcaataggaagtgcatctaaatcggatgaaagcagtactgaggagactggtatgcttatttgtagaaacttataagtaatatattttatttcaacaaagtgaaatgttttgtatcacagaacgagtacaatgctggcttagtattactttttattccctagataggagtatataagcgttaagaagtaatcagcttgctgtttctttctaattattctctaatcattttgctctgaaattgtagcttatttacatttaggggcttgttaaataaaaccttacttttatttcagataaatcaagggagagatctcagtgtggtgtgaaagctgttaataaagcttctagtaccacacctaaagggaattcaagcaatggaaatagtggctctaacaggtaggaacactgtgccatgtgtcataattctaaattctttttaaaaatgatttttatgtatttttttgagacggggttggtcttgcaatgttgcccaggctggtctcgaacttctggcctcaagcgatccacctgccttggctttccacactgctggaattagaggcatgagccactgcacctggccctcataattctaaattcttctatgagtcctcatgagtagaaggggagtggttgttgagtaatgtgaaaagtcatttatgttgggctttgaaattttgtatgtaccctattttgctgatacgctttacatcctaattatgttttgtatagttatgcttgtataacgactttgtttctccttctgggatattcaggggaatgtaggtgtgaagttaaacaaatattttaggatagagggattgctgtgggttgaagcgattcttgtgcttcagcctccctagtagctgggattacaagcgtgtgccaccactccc

SEQ ID NO: 138846 - DNA, 1048 bp, Homo sapiens
gtggtccaccttgagacacaggtctgaaagataggcttttaacctagttcatattctagatcttgcccagaacaggtaattaggctgtcttttatgcagataatgtcagccctattttatcccgttttgttagaaccttagcagaagtcattctgctcatctagattcatattagttaccttcaataagacctgtcctctaaattaaaaaacactctctgttttcccaactgctattccctcaggtttctgatgcaattgggactcctttttcgtaactaatgttctttgtagctttgtcacttacgtggtctcagtggttgtcagcatgctctctaaaatggggataacagagcataaatcttcccacttctagaacaattgtaaaattctagaacaattgtaaaattgagcactcaggaaggaaggcaggtaactgagctgtaaggagctgagactcttttgcctatcacagtgtagaactggaagcagaacctttgatcatctcgttttgggttacgtgtttagcacaaatagaatgatttaagtgattttctaacgtaaggaagtaactagttttaggacttcctttaggttcgtatgaagggtgatacctaacttaaacaaaattttctggatgagagctctttcatcctaaagagactgaaggatgtgaaacaatagcagcaactctgtgttatcttcatatatatgtgtgtgtgtgtgtgtgtgtgtgtgtgtgtgtgtgtgtgttcatgtataatatatatgttcatatatatgttatcttcatatatatagaatatatagaaaaaatatatatatttttgtgtgtgtatatatatgtataatatatttggcatacacatctctgcagcccctcccattgtactaacaattttttttcctcatacaattaagaatatggcattcctctgttttttcccccaaattaggataaaccagtcaaacgaaagaagctgcagcatcagttctcacatgctttaaacttcaatataccacagcttttcacagaaaaatttatttgg

SEQ ID NO: 138847 - DNA, 2097 bp, Homo sapiens
tagctctcttaggaaattcagtcttagaaattttaggggtagaaggccatgatgtaaataattttccctcaaatgattaaaaaattgagtgtgtgactatgtatgtagagaggggctccagagagggagagaaaatgcaaataatcaagcaggagtaaaaatgttaccaggtgaagttgaggtaaaggatatatgggtgagctttgtactattgttatttttccatcctatctgtaaatttgcaattatttccaagtaaaagttaaaataaacttacgcaccaagtatttgtcaatatagttctaggaatgcagttaaaaactgcttcagccccttcccccatatttatatacaaataattaagggtttctcagtatattaattacaatacattgttacttttatatttgaagttctaactatagactgtttcttttttctttttgaatagttttgacctgcttatattgaaagaagtggtacaaaaaatggcaggaatagaaattacagaggaaatgacaatggagcaactagaggctatgactggtggagagcagctaaaagctgaggtaagaattgctatttttgttcatcaacttttaaaattcataatgtatgcacggtcatagtaaagaatccaaacaatatgtaagtttataaaaccaaatgtcaaagccatacataccttcctttcacaaccacccctgccccccttttgaaattgagatacagtaattactttaactttttaaaaaagctgaaacaaagtataaaaggcagtaagtaatgcatccgtaaggaaaataattaccaaataaggccgggcgtggtggctcacgcttataatcccaacattttgggaggctgaggtgggtggatcacctgaggtcaggagttcgagaccaacctggccaacatggcaaaaccctgcctctactaaaaatacaaaaaattagccaggtgtagtggtgggtgcctgtaatcccagctacttgggaggctgaggcaggagaattgcttgaacccaggaggcggaggttgcagtgagccaagatctcgccatcgtactccattctgggcaagacagtgagatgctgtctcaaaaaataaataataaataaataaataaaataatcaccaaataattactatatcttctatgatccttgatatcctcactcccttaagtcttagttgctctgttgaatctgtgccatactgaataatgaataatcctttatgaggggactgcaaggtggaaaatggaaaatatgcagaaatttaaattcagttgacatttgtctttaagccagtgactgtagtcagtaatagtcactgaaataaatttgtgtaagggaaggaatgtggaatgtaggagttttttatattaagcattttaactcaacttttttctgtgtctttttcaaattagcatgggttatgtactgtacactggtaaatttgtgtcttcccttgtgcagggtggttattttggtcagatcagaaacactaaaaaatcctctcagagattaaaggatgctctattggaccatgatcttgcccttcctctctgtctgcttatggctcagcagagaaatggggtaatctttcaggaaggtggagagaaacatttgaaacttgtgggaaagctctatgaccaggcaagttaaagtggcttttatgtttatgtacatgtttttaatcctgttaaaggaggataatgtgttataatttgaaaaatgtcatttttgcacatcatttgaatatgagacatcctaatgtgaaagacattctggaaatagggcctatttctatgtaaattgtgatatataagagatagctccaagagatgttatatgtaaggctgtcaattaattaaatattacatcattaaattcctgcaacttcaagttgtttgcatttatatctttcccgatctctggaaatctcagtcataacagaatagatgcttgcttgcccacttgtgcatgctcactctcttttccctttttttttttttttttttttttttgagacaaagcctcactctgttacccaggctagagtgcagtgcatgatctcagctcactgtagcct

SEQ ID NO: 138848 - DNA, 2092 bp, Homo sapiens
cccatttacaatagccacaaaaaaagtaccaagagatacatctaaccaaggaggtgaaagatttctactagaactataaaacactgttgaaagaaatcatagatgatacaagcaaatggaaagacattccatgctcttggataggaagaatcaatgtagttaaaatgtccataccgcccaaaggaatctacagattcattgcagttccagtcagattaccactgtcattttttatagaattggaattattttctaactgaaaaatgtagcctaagaaaatattctctaaggcagtgataaaatagtaatttctatataaatatgaaatatttatatagaaaccactttgttaaatatttatataggaaaccactttaattataagcattatttcttttgaaaaatagaaagtgtagccattacttagttggcacagtagaaatcctttgatcagttaatgccttctattgtttgttgctgttttccagatcttgtcacaaatacagaagtatgataacttaataacacctgtagtagattcattgaaatacctcacttcactgaattatgatgtcttggcctgtatcctttcaagtgaagtaatatgtagatttcatatttaatagatcatatggtaaacgttttattttcattctattttcctttagtaaccatctgaggttgattcaggtggctgatctgaagtttggtcagtcaattgtgtgtgtgtgtgtgtgtgtgtgtgtatgtgagagagagagagagtgtgtgtgtgtgtgtgtgtgtgtacgtgtgtgtctttgtgttgtataaagggagacatgttaggcttaccaactttttttttttgtgtgtgtgagacagacttttgctctgtctcccaggctggaatgcagtggcactgtctcggctcattgcaacctccgcctcctgggttcaagcgagtctcttgcctcagcttcccaagtagctgggattataggcgtgtgctaccacacctggctaatttccttgtttttagtagaggtgggatttcactaggttggccagggtgatcttgaattcctgacctcaagtgatccacccaccttggcctcccaaagtgctgggattacaggcatgagccactgcacccagttggcttaccaaacatcttgatattgatggaatctgtcttgattgctgaaagatggaaagtaggctaaagaagaaatgttggtactacagtaagtgtatttttcaataattagttttagcaacatccctggtcttggaaaactagaaaaataatttgtaatgaccaacaattttgcccctatgatgtggcatattcatgttttaagggtctttattagagatgtaatgacttagttttttcttaatgtatgaaagattgtatcattgaagctttagctaatccagaaaaggaaagaatgaaacatgatgacacaaccatctcaagctggcttcagagtaagtatttttatttttccaaagatgaaattactatctgtggtaactgccatgttatgcattttattaccgatgcttagagacttttagaagcctatttgttaagagttgctgagaatatctagctactgagtttgttctgcagagcccttggctatgtaaggaggttgatatggtacttatttattttcctaacttaagagaccattattgactgtgatagaatttgggtaagcattactggggaggtgaaatctccttctttttattttatttttttttcgagatggagtctcactctgtcatccaggctggagtgcagtggtgtgatctcgactcactgcagcctccgcctcccaggttctagcaattctcctgcctcagcctcccgagtagctgggattacaggcacgcgccaccacgcccagctaatttttgtattttcgttagaggcagggtttcaccatgttggccaggctggtcttgaactcctgacctcaagtgatccgcccacctcggctcccaaagtgctgggattacaggcatgaaccaccatgcctagccaaaaatctcctttttaactaacattattttataggagttgatcgtaagggatcta

SEQ ID NO: 138849 - DNA, 5083 bp, Homo sapiens
acattttttcccctgatgttgaaaaaggaagagagataaaagttcctcattcctttgctacccctttcctttcctcaccccattttatgtcttcgatggagaaacataaataagctttgtgaaaagggtgggtgaggaatgggatattgtgtgttatgttattaagaaatggtaattttcccaaggctgttataaatttattgttggttatattaatatagacctcttactgaaataacttttccttctttcttttaggaagttatccttagctgtttgcttagcattactgaccaggtactacttccatctctttctttgatggactgcaatgcttgtatgtctgaggaactatggggaatgtttaaaacatttccatatcagcataggtaaatacatattattttcatgtttttaactattagtaattctagtatattaacctctaagtgtttaacttttcctaattcttcatctcatcgttttttaagatatcgtctgtatggccagtggaagaatgaaacttataacagtcacccacttttagtaaaagttaaagctcaaacaatagacagagccaaatatatcatgaagtaagttttaatttatttttcatattaatctaaattatatctgaatctaatatactttctttcaggtagcttgtctgagcctcagttttgggaaagcctatgtgttgtgaatggtatagctgatttatatactacagatggaatgactgttaactgtggttttagctcattttgactaccaagttaatgttttcatagttgttgtgtttacatatggataaaaatctaatggaaatcctctttaatatgtgcatcatattatgggatgaaggttttgttttttctttttaaggacagcctgctgtggcctttgcttacctttagtgatttgtgcaaggtagtaaaagttctagcaatttccactgctgaaagttaccataatgaatttttttaatctgttaggaagaactaatgaaattatccagaactatctccatagggagtcaacttttgagaaatttcttttttaaaaaaatttgtacacttttattttcatatcattaaaaacataagagtgatgttctacttcccagtagattatttgaagtttaattatgaaaatcatgtacttcagattagtattagtttagatgcttaattgtattgctgtattgcaagtgttttcaacgaggctattgtcagttgtcattccttttttaaattcatggcagtggtatggttattctaattaaaagtagttcgttctcagtttatttagatttaacagtgtgtaatgtctgttaaatgttgtccttgcccagtgatattgtttctggtcacagcctattgggaaaacaggtgtgtgcatgatcacaatctagttgttgtttttttttttttttcctgtgagcctatggattatattgaaacaacctagtataataggtgctgttatacagtatgaataaagtgctatgggaggatagatgagactaaatgatttcacttgggggagttttgtttggcaggagttgatattagatctgaaagagtttctggacttaagagttctccaggtacagtttctagcttaacaacagcagctaatatttagggagctattactgtatgtgccaggcattaaactaagtgctctgcatggattgtttaataatacattaagcatttttaaataccttgaattcatccactgtcactaccactactaccttagttattttatctggtgtattatagttgtatattctcttacctaaaaatcctttggtgactgactttacctgaaggtatatgttaagctttatggcatggtgatataaataagaggtcctccctggtttgtccctccctgcatccaacctcctttcctgccaattctacttccagatgtactgagcctacttatgtcccctaaatgtaccactctctccttagcttctcttcccctgtatatactttttgttccctctgtttgtacaggttttcccttaccttcctttccccctttccatctggtgacctcattcttggagagtgagctccagtgttacttctagtgaaggcttccctagcataaactgccagacacaatcaatctttatttccatcactattctttagcatataatgttatcatacctctaggtaccttgctatgattgttttttgaatagtttatgtgtttacatgatttaagtttcagtaaatataaaaggtataaatacagcaaaaagtctcactccatcctccatctactcagttcttcccctcaaggaaaagtaaccactgtttagtctcttatttatccttccatatattcttatgtatatgcaagccaatacaatatatattatccccctcttatattattattatattaatattgtttttctttgtaaaaatgggacctcactatgttgcccaggctggtcttgaactcctggcctcaagtgatcctcccaccttgacctcccagcgctggagttacagacgtgagctaccacaccccagccaccttttatattatcaatagcatataagtactgttctgttgattgctcttttttagaatattgaaatttaataaatgaatttaaatctgtctccttcactggaccaggcttgagagcaggaactgttactctgttattcatccttgtatttcttatttttttttttttttttgggagatggagttttgcaccgttgcccgggctggagtgctgcagtggcacgatcttggctcactgcaacctccgcctcctgtgttcaagcgattatcctgcctcagcctcccaagtagttgggattacaggcgcctgccaccaagtccagctaattctttgtatttttagtagagacggggtttcaccatgttggccaggctggtctcgaactcctgaccttgtgattcacccgccttggcctcccaaagtggtgggattacaggcgtgagccactgcacgcggcttcatccttatatttctacactgaccttagctaaaaggctgagacacaatcttccttgtatttctaatgcttagtactttgactgtcatcgtaggcattaatatgaatgaatgaataaaaatacaatttactacagaatagtatgtgcagaatttttaatatacttggatttttgttatatttgtaagctataactattttaccaggcttaaacaatatgattttgttactgtttgaagtttttacattgagcatataatgtattaacttattacttgtagaatttcatgagttttgaatactatttaaaacatgagcttgctatagggcatttagtaattctttctacaaatgtttattatgttccatatgctagacactggtagtttgaggggaagacaaagacaagaaaatatttctttaatttttgtttgtttgtccctccagggtgatggaggcagaagggaatggaatgaaaaacagagaaaggaggggttggccttggcaagtagagggaggcacctgaaatattggggttagaaatagggacaggtagtggtaagttggaaatttgaacaaaatactgtatagctaacttttaaaactaatggtctctcttttctatgaaaccaaaactgggatatggagaattggaaagggaagcagttgatgaaacagttttgattgatggggccagttttgtcatgagaaattaattaaagcaagttcgtcacttggagaatggtcacatctcctgaattataaactgaattcataatttacttcattatattttcatcctagaaagcttccttcctgtcacttgtagccttttgaagtctctagatttattatgtaatcatctcaggagaggcatttaagattctgtgtaataattgttttgaactgtaagaattcatagataaaatttgcagaatgctggcaaaaggataatgagcaaaggaagaaataaagaggaaggaaaggagtagaatttagtttcaaaatattgtttaccttgaatatgaaaagcagataactttacatattgagggagtaaagttacataagtttacagataacacagtaactctgttagagtcactgagacagatggcacgagacatttcattgcatgacaccaaatttgatatcttaatccctaaactgatgagtcctcctaaatctgaaataattttgattctttgtaagaagagttttatgtacttgtagagtacattaagagttttactgattattagactattactataaagtggaaatgtgtattttataaatgttaagcatttaatataaaatgttaatatcctctgagagaatccctaaccaaaatagcccaaatcctaccataaaggatgtgatgaatgtagttgtttacatgaatccattttggatatttggggaataattgctttttcccccacgatgatgtaacaaagctatcaacattacaaggaatgttacttaagatgatccgtgccacctttttcttcctccgtaggcgcctaaccaaggaaaatgtgaagccttctggaagacaaattgggaagttgagccacagcaatccaaccattttgtttgattatgtatgttttgaggttaatattattttaagggatttttctttctgttgcctttaaatcagtgcaagtggaaatagaatgatgttagaaaatgaaacattgtaaggttatgctaaaaacaaaattactacacaatatatttaacacattgatctattttaatagtaatatgtaacagtgctactattacaggcaatataatagttattttgtatatataatgttattttgtataccacatcttgatttctggtattacttgattttagacttttagaaacattcaaataacatttcattgtgatttatatgtaatactatcactgcaatatttatttatttatttatttttttgagatgaagtcttgctctattgcccaggctggagtgcagtgacccgatcttggctcaccgcaacctctgcctcccgggttcaagcgattctcctgcctcagc

SEQ ID NO: 138850 - DNA, 1081 bp, Homo sapiens
ttgtgcacatgtaccctagaacttgaagtataaaaaaaaaaaaacagaatagtacctgcaacctagagtctttctcatgctgcattctagttactatcctaaccataaccatttatgctttttttttttaaaaaaatcagctttgaggtataatttaaatacagtaaacttctacaattttatgagttttgacaaatgcatacagttgtatgttcaccaccacaatcatgatatagaagttccctccttccattgctgttcctggcaacctctgataggctttccatcactatagttttgctttttctacatcttatttaataaatggaatcatatggtatatactcttttcagtctagtttcttccacttaagcttttgagatttatccaagttgcatgtgtcagtagttcctttattgctgagtgatattttattacatagacgtaccagagtgtagccaccagttgatgggcgtttgggttgtttctacctggaggctattataaagctgctttcaatattcctgcacaagccttttgggaggcatgtgtttttgtgtccccaggggtgggattgatgggtcatatgagtaagtatatgtttaatttcataagaaattgccaaactgttccaaagcatctgtaccattttgcattcctaacagctattgtatgagacttctaattgttccacattcccaccaacacttgttgttgtcactcttttaagttttagtcattctagtgggtatgtagtggtatctcactgagcttttaattttgttccagtgactagggatgttgatcatcttttcatgtgcttatttgccatttatagttatctttagtgaaatgtctgttcatgtctcttgcacatttttaagttgcgttatttgtctttttattattgagttgtaagagttctttattctggatgcaaggccttatcagatatgtgatactgtgaaatttttttcttagtctgatttgccttttcattttgttaactatcttttgacagcaaaaaattttaacgtttaattctgatttagtagtattttttttttttttttttttttg

SEQ ID NO: 138851 - DNA, 1746 bp, Homo sapiens
tgttatatccatatttttctgtttcatcttccagtgcatcttaggtccatcccttgttgcccattcccatatccaagttcccgataccggccaagtttaaaaacagattcagatggtgtgtgttaaatgttccttgaaatccacacttctctgattaagcagttaatttggaacattctcctctgagctctgattttttttttctaatgactgttgtttttatgtgtttctaccagttgagaattatctggtgtaataaagttaggcacaattgaaatgtagaaagcaaatatgagcaagaaaaaatttcactgattaagataactttgttaaaatggtagatattgtagtgtgtgtgtatatagttatatttattatatacttatttatttgtttatttatttattttactttttaaaatagagttggagttcctaaaggtgctaaaggctcacctgttaatgctttgcaaaacaagagagcaccaaaacaagctgagagctttgaagatttgaggagagacgtgttcaatatgttctgttaccttggtcctcacctttctcacgatcccattttatttgcaaaagtggtgcgcataggcaagtcatttatgaaggaggtaagtaagatttttcttacaaacctaaattttgaaatgaaaatattctgagtatacttgtgttatgagtatctttagaaataaaaatatgaacctcatttaataaagggttatgttgagtgaggtttgtggaaaattccagtgtgtcctaaccatatgcagtcaagtgttgcttaatgacaggtgagaaatgcatcattaggtgattcgtcattgtgcaaacatcagagagtgtacttatacaagcctagatggtatgacctactacatacctagactatatggtatggcccgttactcctaggctacaaacctgtacagaatgttcccgtactgaatactgtggggagttgtaatacactgttaaatatttgtgtatctgaacatatctaaacatttaaaaggtaataccttgcactaagatgttaggacagccatgatatcactaggcaataggaattttttagctctaatataatgttatatgaccctggtcatatatgtggtccatcaaccgaaacattgttaaatggtgcataactgtatatattaatataaacccaaatctagcgagattattagtcaagtccctcacatgggaaaatatacttcagacaagtggctgcttttttaattcccttatgattagtggttacttagcattcttttccttctagtcattttcttgagtgtagttttcaatcattgctgctatgtgtaagaagtcttttcagcctcagactgttaaggacccattcttttatttatttattcttttactaagatttttattgaaataaaacatacatacggaaaaatacagctcagtgactttccctaaactaagcacccatatgtccactacccaactcaaatagtttacagtcccaccaacagtgtgaaagtgttcctatttctccacctcctctccagcacctgttgttttctgactttttaatgatcgccattctaactggtgtgagatggtatctcattgtggttttgatttgcgtttctctgatggccagtgttgagcattttttcatgtgtctgttggctgcataaatgtcttcttttgagaagtgtctgttcatatccttcgcccacttgttgatggggttgtttgt

SEQ ID NO: 138852 - DNA, 1837 bp, Homo sapiens
ctctactaaaagtacaaaatcaccctggggtggtggcacatgcctgtaatcccagctactcgagaggctgaggcagaattgcttgaagccgggaggcagagattgcggtgggccgagatcgtgccatttcactccagcctgggcaacgagagcaaaactgtctcaaaaaaaaaaaaaaagtaaaaaataaaacaagaggacctgtgccaggtgtataagtacagcaatacaaatgtgtttgattgccaggggagaacatacagaatgagaaaaagtcttgcttacttccttgcaccagtccatagtgacttttctctctccctccctcctttttttttttttgataaatggaatgaaatctataatgtttaatagttcattattattttcatttactgtttacattaaacctagttaatggaatagattatgcatttctaggggtcaggaacactccttttatagcttatcatagtgactagcagaaactactgagtaatttgttgcctaaagttttctttgtgttagggttattttataaatgtcttcattaatcatcttccactcatacaaggtgactgtttgagatacttgagcctttttcataatggagggttgactatgcacatagtactttttcttttgcaataaattagtaactagcttgtgacttaaataagctcctagaaaaagtgagatgtcaagttactaataatttttctacttgaaatttttcatttagatgatttaaatttatccctttgtgttattcagtagttcacctttcccaaattggatccatattgcaatgctttatttaatttggagtttagcctttaatggggaaatttgtaatgtttttaatggaactgctatatattttcttgggtaaactaataaattcaacggaaaacatcactgttgtggtattacattactttagggactctgtcagacagaagatgtgaaactttgagctgcgacttgattttaaaaggggtacagaattcaggtacttcattctgtcaaattataagaaaataactgaaatttacttagaaggcaaatggtcacgaataagttagacttcttatttatagttttatcaattgagaatagtgtttcctttttatatgaacaagtagttggtattagctattttatgaaattttaatgtaccatttttagcttcttccggctgataattgcattatggatgaacacaaacgagaaattgcggaagctaagcaaattgttagaaagcttacgatggttgtgttgtcttctgaaaaaatggatgagcgagagaaagaaaaggaaaaagaagaggagaaagtagagaaagtatgtaattcattctagtaaaattaacactatcttctggattttgaattatgaaatttaacttctaaatagtcatttatggaagaataatttcttagttttcattttgctgaaacctcattttctggatcatttgctacagtggttttatttttaatctgaatggctcctttttaagagaagctgtcatattttttttcttgtataaatttcaaaatgttttctaagtaaaatcacaagttgtattgactttaattgtcctctgtgtattagtggccctcaaatcctaaagagattctcagagatgatgaattctggtttcctgtggcacgacataacatgaagtagaacttaattccaagtctataaactgtaatgcctgtgtctgtttttttttttaataaatttattattatttttgagacagggtctcactctttcacccgggctggagtgcagtggcatgattacagctcattgcagccttctacct

SEQ ID NO: 138853 - DNA, 1560 bp, Homo sapiens
accccatctctactaaaaaaaaaaaaaagctgggtgtggtggcatatacctgtagttccagctactcaggaggctgaggtgggaggatcgcttgagcctgagaggtcaggactgcagtgagccatgaccatgccactgcactccagactgggtgacagagtgagaccctgtctcaaaaaaaaccctccaaaaccaaaaaacacacaaaaaaacagaaaagaaaacacacatataaacagaactgcagactaaatcttgtgcattataaaatctcacttatgctattcagctgtgagattttatttaaatgttaacctgcattgtaaattgtgtccgtttttgaaattgctttccttgtgttcttcagaagatgttccaatgtgaaaagggatgttggcataataatccttgtactgaattcagatatttggtaagataaggaagagcagtgaagcattttcttggcctagagtatttgatctaattgttcttagttattggtaggtgaaggatattgctttaattgtcctttctgcactaaatggaaacttttttttttatatttctaggaaccaaatggcgagacaccatcatctttatacagagttgcagcagtacttctacaatttaatcttattgatttagatgatctttatgtacatgtaagtcaagtgggctgctaagaatacttgattgtctgtcccaagggtagggaagaggagtaggtagccacatagcacccccaggattgggttggttcgaggttctcaagtctcactctttgaagccccaatacattgttgatttgtgtttactttataaagtgaataaatttagttatttggcagtctatgaaaattaaatacctttttggtcacctttatggagtttaagttttggtcacctttatggagtttaagtttggatatgaagttcaagttcttaactgtcatcaaggcatagctcatggggagagaggccaagttctaaccaatgtggttttttaagcctttttattatctacaaatgatgggaaatataaagttacctatatactgcttctttctctctaaaatgttaattttaggcattcaggatgaatggggaacttcattagtgtatttttatatttagtatatttaaaaaatatttttcttgtgttattcgtgtgcactaaatgactattatgcttttattgctggacccaggatgtagaagagttcatgattgtggcagatgacctctagtttaacaaaaatttagtcatcagtttcagaatctaggctaatagtatataaattcctcttctattaggttttgtattaggatatctattaatttaaaacaagtatgtccaaaggtgatatcatcttcactgcctttgagatcactttattaacatcattgcctatttttgtatactgtggctacagagttgagtaaaacttggtctttaccttggaagcagtcatactctaggaagggagaaaaaaattttgcattatttaataggtactctattggagatattcacaaagctcagaatagatagtgaccata

SEQ ID NO: 138854 - DNA, 1062 bp, Homo sapiens
aaaaattatgaaaaggaaccaaacaaattctggagttgaaaagtacaataactgaaataagaaattcactgtagaggttcaacagtagaattgagcaggtagaagaagccaagccaaagaaagaacactggttaaagtaactctaggtaaaatataaaagccagtactattacatttgtggtttgtaagtcctctttttttcctatatgacttaaaagacaaatacataataattatgaatctttaaaaagataatttcaacttttattttagactcggggtacatgtgcaggtttgttacctgggtatattgtgtgatgctgaggtttggggtacaattcatcccatcacccaggttataaatctgtcaaatggcacactataaaaatgtaatttgtgactaacaataggtggggaggggcagggatgtataggtgcagaggttttgtacactattgaagtgaagttggtattaattcaaactaggttgttttaagtttaaaatgttaattattatacccaaaggaaccactaagaaaataattaaaaactaaacagaaaaaagaaggggatcaaaatggtgcacacacacaaaatcaaacaaaaaaggcagtgatagaggaaatgaggaacaaaaatatgacagaaaacaggtagcaaaatgatagaagttcatccttatctataattattttgaatgtaaatggattaaacccaccaattaaaaggcaagagtttggcagaatgtataaaaaatcatgatccagttacatactgtgtataaggaactcactttggatttagagatacaaatagcttgaaactgaaagtatggaaacatattctgtgcaagcattatgctggagagacctggggtggctatgctaatatcaaagtagactttaagacaataagttgttacaagagacaatgaaaaacattatataatataaaatggataacccattgagaagatataacagttataaacatacctgtaccaaacaacagagccccagagtatttgaagcaaacattggcagacttgaaggaaacatagtt

SEQ ID NO: 138855 - DNA, 1885 bp, Homo sapiens
ggtatattttatagttctgtagtatatgtaagataaaataaaaatgatttttaaaatgatggtccacttttgtgaacccggacttttaactgtttatcagcattccaaatacttctgcctaaaacattaaaaaaaaaccccttttgttgcttaatttgtaaaatgcattgtttgattttcgtgtttttccaagaattaataatgtggacctgtttcactagcccgagtaatcaagaactgatgaggcaaagtgtggcatagaggaatgtttatttgactggtatcactggtcctggactatactgacccagctctgtcattaacccgttctgtgattctgggaaagtcacattctcatctgtaaaaatgtgtagtggatttatttccctctgggagagaggaagcaaatttgtaaagaaagttgtttttaaaaacatttttatcttgctatatgagttattcctgaaaattaatggcttcactagaaatgatgtataatcatttttaaatttttgtatgtctcatctgttgcaggatgctttaatctggatcccaatagagttttggatgtcattttagaagtgtttgaatgcaggccagaacacgatgacttctttatatctttgttagaatcttacatgagtatgtgtgaaccgcaaacactgtgtcatattcttgggttcaaattcaagttttaccaggtaaagaaaaacgtgtatgtatgtatatttagagattgatttcttaatcttgtttatataatttaatttgttttatttgtaaatgattggtctcatctcaggtgttctagcagaagagatagataaatggatagctaacaatgcaatgtgataagtactatattggtagtatgaatgatgtgatgtgaaagcctagaggaaagaattattaagttttgccttgggagaggtggagtcagggaagactttatagatgtgtctttttttaaacctggtccttgaaggatgaataggagttcattaaggttttctctgcatgagtaacgaacaatgtgagaatcaagatgtggcagtgtgaatatatagagatagaaggaatggttcatagtctgatgtggctgggttgtaagatgggaaaagaagggacaggaaatgaaattgggaaggtatgtgtacttcagattgtcacaggctttgaatactgtgttaagagttagaatcttatttttatttatttattttttattttgagatgggatctcacccagactagtctcagactcctggtccgaagtgaacctcccacctcagcctcccaagtagctgggactacagtcgtgtgccactgtgcttggatcacgaattttgttttataaacaatggctattggaattttttagggatgtgaataaatattcaaggcacatcttacatcattcccttaagccactaaaatagcggtcaagctaatctgtgtctctgattatttctacttcaatccatctttcatattattgttattgttgctttcttaaagagacctaactgaggcacttcactggtcaaaaacctttacttctaggatgaaattcaaacttctaaatgtggcagaaatagcacttcacaatttggcactgttctttccggccttatctttatagttatttttttcttaaatctaatattctagtcatattaagtgactagccatttcttgaacttagatatagatattgctatgaacctttgttcctgtagttccttataactaagaaaccattcttacccaaccctctcacttctcctttcttcatcttgtgaactcctatttattctttaagagcaaatgctgcttgttctgtaaaggcttagctgactctttacccatgcagaattagtcactt

SEQ ID NO: 138856 - DNA, 1055 bp, Homo sapiens
tgtattttttgtagagatggggttttgccatgttgccctggcaggtctcgaactcctgagctcaagctatctacctgccttggcctcctaaattgctgggattacaggcgtgagccaccatgcctggccttgttactgttttttagatcatacttttattttgttattcattggttcttgctttgagatgtgcagtttttttgcaaatagtgtttcttagaaatagtctagcatagatttttattagcttctaaagaaactctttctacattgtagatcatttcattttgttaaaaacatgattttctttgtctcctaaggtccattctctcaggaacttgatgattgaggctataattccgttttcttgcctgaaatttataggctggacatctctcctagttatgtctgcaatattatcttggtcttttattttcctgttaagatctcaatttggcctaatttctacaacagtcattgtcagtttgatcatatttcttgcccctagttggtgtcactgtaacataactggttattttttctatctttggggaaactccagttgctttttcctgcatttcttcaaagatgtatcattcaaaaggtgtgaactcttctcaagggtagcgtaaacattttattaatcgctatagtttttcagctttattcaggcttcattgacatatagtagaatgcttatatttaaagtgtacaatttgacttttaatatatgtatacatctgtgaaaataccacaaacaagataatgcacattcctcccactacccctgaaattttctcttgcctctttgtgtttatcctccctctcttctctcttctgttttcccggagaatcacaagcacctggcacatagtgggtagttatttaatacttatttaaatgaaggagggcatctatggccattgtagatctgcagtttctttatttttccacttattctctttaaatatggtttcttgtttgttcctcaaaaggcataaaggcatatgtgtgtgtgtttgtgtgtgtgtgtgtatgtatgtatatgtaaaaat

SEQ ID NO: 138857 - DNA, 1031 bp, Homo sapiens
gtatactacttacttttcttgaactttactctcagggagaacaggctatgatcctgtttctgaagaacagtgtaacaggcacaactgcaagctcatgaggtatatggacagtctatgagtataaacaatttgatttattgggctaaacctatattttaacccaccaagtagcagtcaaatgtcaccttcttagtgaagccttccctgcccacccctgtcaaaactccctgctattccctgattatttttctttttttgcacatatcaccatataatatgctctgtacctcctccccctccacctgtgatgtaggctctgtgaggactggggttttgtttggtaccttatccttaatacttggtatgtaggtgataaataaatactgggtaaaaaaggaatgaatatttcctctattcttgtataatctatactgactcttagcatttttttcctgatatggagaattttagaaagttcatcttcctgtctcagtgtttatttatctctgactaggtgatttcctcctcccccaattgtctgagaaatgaacttttatttttttgagacagagtcttgctttgttgcccaggctagagtgcagtggtacaatcttggctatccgcaacctctgcctcccaggttcaaacgattctcgtgcctcagcctcccgagtagctgggattacaggcgtgcaccaccatgcccagctatttttttgtgtgtgtgtttttagtagagttggggtttcaccaagttggctgggctggtctcgaactcctggcctcaagtgatccacctgcctcagcctcccaaagtgttgggattacaggcgtgagcccccggacacggcctgaatgaaacttttcattgatgtgaaaatagaggttgaaacttcaattccaatgagtattctttcagtgttgttagcatttattggagtccctcttagtgcagacttcatccaggccttgtctcattctgtccagaacacctcactgaccagcatcctatttttcatggcctctttgga

SEQ ID NO: 138858 - DNA, 2576 bp, Homo sapiens
aaaagcaagagagactattttacacagttggtattagcatgtttggtaagtttttaaaaatatttttcccttttaaaaatctgcattaaacagttgtaatagaagttaatcatgttaatgaaggaggatattgacattcagttgacttttctcataaggtgagatttgggttttgaaatggaatgttttgtgaaataagacatgctgtttctgtgaaataagcatgtaaccatatccatatcacttaaactatctatacatttaaaacctttggtgatattcctgacctagtaagttcctaagaaaaaggtaagcatttataaagtaagtagaaatgattgtagacagcttttaaatggatttttttcctcataaactgttaagcaaagagtaaaagaatagaggtagtttaaaaatgataaattctagaacttgccatgattgttgtctggtaaaccatttgtgttcataaatttagaaccagggagaactgccgtggttgagacctggaagaaggtgcttgtctttgctatactagaatttaacttaaagtaggaggctattaagtgctgtattaggtgaaagtccagataagccaaatgcagtcatattgaaaatttcatctgtagttcttgtcatttataggcagtatacaacatgcatataattttatagtgaattttttgaaagccgtttattaaatatttcaatatttggagtcaatatttgttaaattgaacttctaagcctttttataaattgtaggttgttatgtagagaatgttatttttgtattcttatttaggaagctttagtttgaatatatttaacattgtggatgcaatgctaaggaataaatgacctttaatattttttaatacagtatttagtttcagacacagttctaaaggaacgcctggatccagaaacactggaatcattagggcttatcaaacaatcacagcaattcaatcaaaagtcagttaaaatcaagacaaaactcttgtaagtacacgtatcttatgttgcagatcaagtatctgagtatgttttttcgttcatattttgaatcctagtagcttctaaggggactttgaagattgttttttttgtttgtggttagcatgtcttgtgttttttgccttctaaaagtagcctaatattgagtcatcagtgatctttacctgtgcaaaaccattgttacttttgcccatattcaaagttaaaataatactcatgctttcatcattagcaataaaataatttatgactgtggctatactcagggtatattcttagagatggaaatggtgatatgttattgttccctgatattaacaatatccttttcttgtgttactggttttccctatgtaattaatattggggttctcatatgaatcactgttattttctactctaaaaggtacacaaagaggtaaactttcaacaactattcttaggattgttgtaggttggagataagaaaattcagtgagaatacagtactctgtgcaagcttgttaattaaaattaattttatccccttaatgatatttatctgatttcagttataagcagcaaaaattcaatttgttaagagaagagaatgaaggttatgccaagctgattgctgaattggggcaagatttatctggaagtattactagtgatttaatcttagaaaatatcaaatctttaataggtaagacatttatctgtatagtatgtgttgttaagataacaagttattttagctattggagaatatccataaagacaaaatgagtgcattccatctattttttttttcagttaaggaatgggagaggtgtttagcttttacttttaatggtttatcaataattataaaatttagcatgatatttgtgagaaatcttattgtcactataccttgtatgttaatattaggtcctgctctgtctagtctttcttttttgtggaggggatcctgagtggtaagccaacactttcaaaagagaatggatgacaaagaacaggatggactgttctgatagagtgccctacgtttctctagtatttctatttttaagtatttctcaaccattttatggaggaccaaaaagcaaacatgaaaactttaatacagtaaatcttcagtgaacttttgaaactacagatgtgtaattttgaacttgattttcaaaataactttacaagggactttgatacttattttatctttatagtagccttttaaagtaagtgcaacagctgttgtaaaagtgtaacagataggaaagttattattctccctaccctttaagtagaattcctgtagcattactgttttctttttatttgcattgagcatttggaagaagtagttgacttctgtaaaaaagatgaatgagcactagaaaaatagggtaatccagattttcctgaggtggaaagagtttttttattatttactaggtgttgtgctatcttagggaagattttgcagtacctgggtcttgagacctgccagaggagtcatattttgtgcctcactagttgtatcttaggggtgcttatcctcagcttcttgg

SEQ ID NO: 138859 - DNA, 1027 bp, Homo sapiens
cagaaaaccagatagcagggcaacaattgggagtccctgaaaaggattggtgagatacacatgggttaaaagtcttaatgagaaattgagattgtattgtaatttacattgcataaattataccctaaaatttccttaatacacatgagctaactgtgtgcttagctacagtggccaggatatgtagaaatggcaactgtccaagaagggaaagtcaagggccaggaaaatgtggatatgtttgatgaaaaatccctttctcttttgattcttagtgttggcagtagaacatgtagatgacaatttttattacttcactaaaaccagtgcttctctttatagcatattctaaattatgagttgactgtaaaattaggttaatagtatataatcagttaaagcagtaatcctgagatcagccttgtttgtaatcctgccaatgctggttgaaatttttggtgcttggcatttggcactaattgttttttttcttccacacttcagatcagaaaattttttgacaaattttctgaataatttactgaaactctcagtttttaaatatttcagtaggaagataaaaattttgaataatttctatttactgactagaattataattcaagataagatgttaattttttttttttttgagacagagtcttactctgtcacccaggctggagtgcagtggcgtgatctcggctcactgcaacttctgcctcccaggttcaagtgattctcctgcctcagcctccctagtagctgtacttacagatgtgtgccactgagcccagctgatttttgtatttttagtagagacggggtttcatcatgttgcccaggatggtcttgaacccctgacctcaggtgatccacccgcttcggcctcccaaagtgctaggattacaggtgtgagccactgtacccggccaaaaatatttaatactgtcttttcataaggttggtggccaggtagcttggttagaacatggtaatttgaccagggtggcgaaagtcatgggtt

SEQ ID NO: 138860 - DNA, 1930 bp, Homo sapiens
actagattatatttttcccttcatagttatttagtaatatgaattattgttacaagtcattgtcttgtacgagtaacatgaattcatgaagatgatgcttggttgcttttgggaaatttctcttagcctatccagtccattttttgtttgagatggcatcttgctctgttgcccagactgagtgcagtggcacgatcttggctcactgcaacctctgcttcctgggttctagtgattctcctgtctcagcctcctgagtagctgggattacaggcgcgtgccaccacgcctggctaattttttttgtatttttagtagagatggggtttcaccatgttggccaggtaggtctcaaactcctgacctcaagtgatctgtccaccttggcctcccacagtgctgggattataggcgtgagctaccgtgcccggcctatccagtccatttttataagcaagattatgacggcaaacttggaaagaggatttccctcacctgctccctcactcacctaccctcacccttggcagaaaaaaaatgattcaagtgtgatcccagatcaaggatggggaataggagtaagaatgctagctacctctaataataatgatgatgatgatgacaataataatgataacaatttaagttctgcttttagagtaccttccatgttctaggcattgtgttaagcatttaatctttgttttaatccttacatcaactcctgtaaaggtggtaggagtacagatcagaaaaatgaggttcagcgaagctgtgatttttcaaggccatgcaagccagtaaggcagaatttgaacctgggtccctttggctccacagcctatgatctttttattacatcatattgtcattctaaatgttgacagttacaagggaaattagtgctgcactttccgggttaagatagcaacttcctccccacccccccacccccccccaccccctcaccacctcccccccgccgcccccagccccgccccgagaatggagtttcagtcttgttgcccaggctggagtgcagtggtgcaatctcggcttgctgcaacctccacctcgtgggttcaagtgattctcctgcctcagcctcctgagtagctgggattacaggcatgtgccagcacgcctagctaatttttgtatttttaatagagatagggtttcgccctgttggccaggctggtctcaaactcctaacctcaggtgatccgcctgccttggcctcccaaagtgctgggattacaggcttgagctaccacgcccggctgatagcaactttaacagactaatagtatgaaggtgagggggcatgagagctatagaaagggggagtctgctgtaagttgatatgctgatggggcctctgggctggggtaggtaattggtgatgctgggcactagagctggaaatagctgagggctttttattgaaatcataggggaaattaaagagaatttattcgaggtaaaggagtcagggataataaatgagtttattagaatggtgttatgagttagagcaaaaagaataaagaaaccagggaaggtacagttgggataatagagtcctgtactgattgttgagatagctcagctaagaaatttactgagactcttttaagcgtttcctaacattgtcagaacccaagagaatggttagacatttaagtaatttatccaattctaagaattaagattaatgagctaaaataattcattccaggttcacaaaccctcagagagtaagtgtcttaatcaggttaagtggctgagaggagagacttgacttgaagaggatgaatctgccatccagtgcccctgttcttagggaccttgagaggtagatcttagggactttagggccctggagcatagatacatgttgggtaaaagaatgggcccagtttagccc

SEQ ID NO: 138861 - DNA, 1004 bp, Homo sapiens
tatcacaactcattgcaactttgatctcctgggcttaagttcccgcctcagcctcctgagtacctggcataacaggtgtgtgccaccacatctggctaatttttttttttttttttagtagagatgaggtctccctatgttgcccaggctggtttcgaactcctaggctcaagccgtcctcctgtcttggccccacaaagtgttgggattttaggtgtgagccactgcgcctggctaagaagatttttaaaatatttgattttttaacttgctgtttggttctgaaaaaattttgattccactcaaaaggagattataaatagactttattttacattagcatctttaaagcttcttgtttcactacttttcatgattggaaggaggtaaagttttcagtatatgggacttaaaaaaaagatgaccagaaggaggtgttcacctgaccactaactacccactccaaaaccaaaatatcttttttcaggaaaggggactgtggtaattaatagtgaatgttgctacttgtagttgacagttatcatagaactgccattttatacatgtattttttgtttgatttttatgggacaaagagatttagatttggggagaaatttctctcacactagggtatggttaaaactcggtagtatatgtactgctattctttatctgttgtcactatagtgctgagattgaattgagtatatatctgaagtctactggtgaggagaatgattggtttgaatccacttgctagagttcattgaatataattatagagacttgagtagcatgaaaaaatgctttaaaattgttttggggggaatcagaatgctatatgatgtgcatggtgaatttaaatatgtaaaatctgtagacatacagaaaaaactggaaaggaatgttcaagctgtagttatagtagtggagagatggttaacatttttctaaccttttaattttgtgtttttgtgaaaataaaagaaaaaattgctaga

SEQ ID NO: 138862 - DNA, 1048 bp, Homo sapiens
cagatacatctacttgttggggaaaaatctcagtgtttgtttttagtttcttgttataactaaggaatacctgttttttttttattaaaaaatttatttttaactaagttttttttgagacagggtcttgctttgtcacctaggctggagtgcaggcgatcacggctcactgcaggcttgaccccaccaggctcaagggattttcctgcctcagcctcctgaattgctagggctacaggtgcatgccaccatgcctggctaattaaaaacatttttttgtgcgggtgtatgagtagggatggggttttgctatattgcccaggctggtcataaactcctggcttcaagtgatcctcccccctcagcctcccaaagtgctgggattacaggcatgagccactacgcccagccaaaggaatacctcttttatactagggaaatgtaagtatctattatgcaaacaaattgccttattgtaataacctttcaatggttccatatgcaacttgagcaaatctttgagattctaactaatagttcatgatgacattgtcatctgtgtcctaatgaacatgtttgtagcctggtgactgacaatatagaattatatttcaattatttcttaaagttatgtaatgatgactgtaccattagtctaggtaggagtttgcaacactgatgcaacctcttccccgcaaccattggaaggctttttgcaaaagacatgcattaagattgttaaatagaaatgaaactattgaaaatgtgaggaagcaagtgcattgttataaggagaagttttttttttttttttttgagacagggtctcactctgttgcccaggctggagtgcagtggcacgatcttggctcactgcagccttgacctcctgggctcaagtgaataaggaggaattttaaacaattattttatttctctttctttctcatcctttccttttcctttcctctttttcttttttctctttttctatatgaaggaatatttgaaattgcattttagtagcccgagtacaaagggaaagatg

SEQ ID NO: 138863 - DNA, 1896 bp, Homo sapiens
ggaaggcaagatgggaagttacccagccagaccatcatcttcatcgatattagggtaatcccccaaaactgataaaagcagttcattgttttgtttactttcaaagccagctcatttatttaggggctgttatgtttgtagattgctcagcttcctcctttcagctactgttttttgacagttttacttttttttttcccccttgagacggagtctcgctctgtcgcccaggctggagtgcagtggcgcgatctcggctcaccgtaacctccgcctcccacgttcaagcgattctcctgtctcagcctcctgagtagctgggactacaggcgcgtgctaccacgcccggctaattttttgtatttttactagacacggagtttcaccgtgttatccaggatggtctccatctcctgacctggtgatccgcccacctcggcctcccaacagttttactattattgctgccaccttagcatgagtggtattagggctataaggtgaaattctgcttggcttctgactggtaatggtttgagaaaaagtgatgtaggagatcgaaatacttagataaaatggaattttaggttcacattatgtatatttacataatacatgctatctgtcatagttcttatgtttgaagagctgcttaaaaactgttattagaagccgagcgtggtggctcacgcctgtaatcccagcaaattgggaggccgaggcgggtggatcacctgaggtcaggagttccagacaagcctgaccaacatggagaaaccccatctctactaaaagtacaaaatttgccgagcgtggtggcacatgcctgtaatcccagctactcaggaggctgaggcgggagaatcgcttgaatctgggaggcggaagttgcggtgagcggagatcgcgctgttgcactccagcatgggtaacaagagcgaaactctttaaaaaaaaaaaaaaaacaaaaacccaaacaaaaacaaaccaaaaacaacagcaaaaaaacctgttattagaacttacgtgtatgtagttattgcatgacttgtggaatgtggattgaattatagtagatccaaatcagtatagtcagttttatgattgcattctgttacaggaagagaatttaaaattgtgtaacataataagctattttaaatagttaaacacatcaccatccagtacttagtttcagtttatttgacctgttttccctctatgaaactttgttgcatatagcatgtctttggagtttttgtgtcttcctaaagataggtgttagcattttcatattactaggcagaatacgtggtggtgcaaatatattacaaaaaacctttttcctttgtctgaaaacagcttctgaaatataaaacagcaactggaaatgttaaaaatgaaggtagtgtgccaccacattattagtgaagctatagatttggcgtttagaatatgaccaatatttaaaattataccttgggtgaatttttcctttttaacaagataaattagcagataagctttaacttgactgaaaattatctttttaaaaataatgtgatatatttcatgaggttgttaattcatttcttgtctgtcacttcttaccagcataaatcttttctgggggtggtagtcagctagtgttgaaagcaacataagagatgtatggggcattttataactttcagatagggcaaattcttaactgtacgccatgaaaaacaactgtctattaaatggaaggtcttgactttgaagaatgttttattaggtaattagagagaaaagtaaaactgtattttgcctatctgaatggtccatccatcacatatctagatatcccattatgtttccagagataccaattatgtttttaatgctaaattatag

SEQ ID NO: 138864 - DNA, 1921 bp, Homo sapiens
gagggagacgggagagggagagggagaaggagagggacccgattattttcttttatctcagcagtcagcagggcgtaatgtaatttatttgcttatatttatggctttcccaaagactattatttctctattcccagtgtctagcacatattaggtgcttgaaaaatgcgtgtttgtattagtggttaggggtagatattacggaagaagatgaagtctacttgttggcctgtggatggcatttctctgttctaatgggaagtaaggccgaagacttcggagggcgcaacccgtgtagtaacctcgcaaaggggcccgcgagtctccacgtcgttggctgccttgcctcgggtttccgctgggtggagaggaaagtggggcgggaaatcgaaaaacgaactctcagctcccggcattcctcgtgggcggtgctcccctttgacccttcgctcgcgtgctacacatccgggcttctgctactagtgagaggaagatggcggccgcggctgtggtggttcccgcagagtggataaagaactgggagaaatcagggagaggcgaattgtgagtgttcgggccggaggcaggcgcactgccgggccgggccagggcgtcagctgcactctcacctgtagtgggaggttgagggggaaagatgtaccccctcccccacccgggcggcgggcgtggatggtcgtctaggagtttcgaactcggggagaggtgctgtttaccgccgcggacctccttccttccctggcctcccagaaatcgctactgcctgcggtagctcggcttcctttagcctcttagtagaactcttattccgcccctgcaggtctccgcgctccctcttggtctctttttgtgtccccctcttcgcttgatctcacttggctcctttatctttatggggctgagccggggcaattcggactttccatctctctctgtgccatttcttcactctgcacccgttggactccgcagtttggagcttggcgcctcctctgcctgaagtccaaggagggcgaaccgtcccggattcccctcccctcctcttcgcccgctgccgcgaagcccggggcgccgcgaagaacccggtttggcacctctcgccctcccggggagcggtctctcgactgtcccggcctcgcgtagcgccgtggggaagtgtggcagggattgccgctttccctgaagaaccaccgacatttctttgctccgtcttttcaccttagagctatttcgggttggattcaactttcgtcattaaatgttccctaaaccccattttatcctgggactgcaactaattctggcagctctccaagcttctccagtacctaggataacgcgtttcctttagtcgtgaaactttcccccgtaacaccgaaaacagtaatttgccatacccctagtcttctcgcccccacgttagagcgctccctcctccccttcccctggaaggagtcgtttaagcagcaaagcaaacctcagatataagaacaaatattaataacatctcatttccttctctgggtcgcttttagatgctaaagctcaaccctggatgaaattaaccctcgttagccatttttgtcgtccttgcccacccctctccatttctagtagccagtttaccgtggctcatgctaaagattcaaatctttgtaacttcgttacttggaacgaaacacgaggaacgcgttgccggatcccgcgcttgtaatagtgccagcctatgtggcttcctcccccgcaccccccgcactgctgtatgaagtcttaacagtgtgagctctagaattccctaaataagcggctgtcttagccacttaagtagctgagtgaccttgggtaagttccttaaccacttggactgtttccccttgagtaaattgggaataataagtactct

SEQ ID NO: 138865 - DNA, 1025 bp, Homo sapiens
atgatatattatgtaggttaaattagattccatatatgaaaacattctaaattgtaaagcacattacatatgttagttattatcaaaggtaacatcgtgaaagaagagaagatgagctatagaatcacacaagcccatgcttaaattttgaccttacattaaaccaaagaggattgatttttttttttaattgagacggagtctcgctctgtcgctcaggctggagtgcagtggcgcaatctcagctcactgcaacctctgccgcccaggttcaagcgattctcgtgcctcagcctccttagtagctgggactacaggcacgcgccaccacgcccagctaatttttttgtatttttagtagagacagggttttgccattttggcgaggctggtctcgaactcctgacctcaggtggtctgcccacctcaacctcccaaagtgctgggattacaggcttaagccaccatgcccagccaagattgaaaatttttagtttaaattcagcatgtttagtagagaagtacttacttgtagctaaaatgatgggatgaaggaaaatgaaaattagtttgtagatagtatttgggtacatgcggacactcatgaaatatgttgtatcgtttaaatttggtttgtagcacagtttcctttactttgtgtcatttaaaaaaattaaaacctagacagaagagaaacgtactaaatgtttgaatatagatagcactgtggctttcagatagagttaaatatttttactgaagaaagagaaaagatgtgggctcttatccataacttgtttgatcagcctgggcaatatagtgagaccttgtctctacaaaaaaaaatttaaaaattagctgagtgtgctgtcgcctgcctggagtccagctcctcaggaggctgaggtggtaggattgcttgaaaccgcaaggcaggggttgcagtgagccaagattgtgacactgcactccagtctgggcgatagagcaagaccctgtcccagaagaaaaaaaaaagttgttta

SEQ ID NO: 138866 - DNA, 1076 bp, Homo sapiens
ggcggcacacacctgtaatcccagcactttgggagtctgaggcaggtggatcacttgaggtgaggagtttcgagcccagcctgaccaacatggtgaaaccacatctctactaaaaatagaaaaaaaaaaaattagctgggcctggtagcacacgcctgtaatcccagctacttgggaagctgaggcagaagaattgcttgaacctggaaggtggaggttgcagtgagcccaaattgcgccactgcactccagcctgggcgacacagcaagagtccgtctgaaaaaaaaaaaaaaaaacctggtgggttgctcagaggcagttacctatgtaacaagctggcagaaattctcaggataggcaaaaagataagaaccaaagaacatatccttccctttctaagtcataaaaattacttcctgtgaatgaaaagccaaaactttgcattaccaggccttgctattgatagtttacttggccagtgtattcacagagggaggaagcattgtcacatggcaaataaccagattacacccatagtctggttggcaggattgtacaagggtgcctgactaatcaagagtccacctgcttatttcttttcattagaatctaatatatttgctgtatagaatttagaaagttaagaaaagcgcaaagaaaataatctcactgctcagagataaccacagcagaattttgatatgtaatttagcctgtctttatatatctgtattttttataatttgggttatataatacaacatcattttgtaaccagctttttccacttaatacaacatcatggtgctcgctttggcagtacatatactaaaattggaatgatacagagaaggttaacatggcccctgtataatatatgcatgtttttaaaatacatcctgaacatgaatttttaatggttacctggtggcccatattaccatagtattgtcctcttttgttagatattgaattgtttttagtaaatagcactttatggaacatccttatatatacactcataatgaaatgatgggggattttttttttttttttttgagatggagtctccctc

SEQ ID NO: 138867 - DNA, 1026 bp, Homo sapiens
ctgcctcccaggttcaagtgattctcctgcctcagcgtcccgagtagctgggattacaggcgtgcaccaccatgcctggctaattttttgtatttttagtagagacggggtttcaccatggccaggctggtcttgaactcctgacctcaggtgatccgcctgccttggcctcctagaatactgggattacaggcgtgagccaccgcgcccggcctgatcagggatttatttatttttatttttttgagaatatgtttagaactagaatggatggttcaagagataatcatatatttaagacttttagaacatatattgccagattaccttccagaaaagatgtaccagtttttagttctaacaggcaaatgcctcttgcttcatactctccagccactgcgttttcgttgttggtagtaatgttgacctttgccaaataggataaaaatgttatcttttaaagtgtttatttctttgattattaatgaggtttaacattgttgcatatgtttgttgaccattaatatttcccacttgtaaatttgcctgttttctatcaacgtattaatctttttcttatagattttttttttttttgagacggagtctcgctgtgtcgcccaggctggagtacagtggcaccatctcggttcactgcaacctctgcctcccaggttcaagcgattcccctgcctcagcctcccgagtagctgggattacaggcatgtgccaccacgcctgactaatttttgtatttttagtagagacggtgtttcaccatgttggccaggctggtcttgaactcccgaaatcaagcgatccacccacctcggcctcccaaagtgttgggattacaggtgtgagccactgcacccagccttcttatagatttataagtgtattcatactactttttttgttttttaagacagtgtcttgacctgttgtataggctgaagtgcagtgacgcagtcacagctcactgtaacctggaattccttggcctacattgcccagtctggtctt

SEQ ID NO: 138868 - DNA, 1025 bp, Homo sapiens
agctactcgggtgactgaggcagaagaatggcgtgaacccgggaggcggagcttgcagtgagccgagatcgcgccactgcactccagcctgggagcgagactccgtctcaaagaaaaaaaaaaaaaaagaatttaaagaatatagttaaaggaaaaattcactgggctctgtgaaacaggttaaatatgtaaccacttcaaacagaaatgacttagtcctctcacctagttctgaaaatgtactaacatcccattttccatatcaaaagcacgtaatttcattagcaaaagcctctttgttttagacttaaaatcacctctgatccaccaaagtttatgcagttaccaaactactattttaataacattttgacagctttattaagataaaatttatataccataagatccatttaaagtatatagttcagtggcttttagtatatgcagagttgtgcaactatcaccacaatctaattttagaacattttcattactccagaaacaaccccagtaaccatttgtagtcacttcctatttccccctccccagccctaggcaaccactaatctactttctgtttctatttattttaataacatttcaaacttgtaatattattgttctcatgcttattctgggtcgttggctcagaggtttaaaagctcttaaactacccaaatttacaagtcctatgacatcctcattcagaaaacattcaaatgatggtttcataatgttatgatagttccatcttctaagagtttttgatctggagcatatgtttcaaattctatgtttgtactactgctaaattcacttaattagaagaagtaaaatcattctatcgagactcaagaatgagtttgttctgtttatgttaacgattccaggcttttgatggtaggaatggctttagcagtcttctgtggcacaccattatcttaaataatattgtcaccttccccactgtcttcatcctttggctcaaagtttggttcaatctgctgtggttaggcaagaag

SEQ ID NO: 138869 - DNA, 1958 bp, Homo sapiens
cagtacaaagcctgaagatgctttcacagagaagccttaaattatcccagcatactttattgcacccacaccttttcacttcaaaaacctttttgtcacccttgtctaatattcataccctattttcttctatattctcaattcatctgctccatatatacttgttttctgtggtatcattttccccacctccatttcacttagatcctatatttttttaccctatcttaccctttttgtttggtgccttcctccaaacccaaggtttctgtctttcatcagtcatccttccacctttcactcttaaactctggtaattctggttttcctccttctcaaaaagctcacactctgctaatgtgtatatattgttcacttgagtgcttctaaataaatatttacttttcaaaacagtgaaatctgaactattagcatggaaacaacctctgggaagataagatctccactcaaaagcttcaaattgagattctcctgctcatgttgaatgatggttttatctaatattttctgaaatagggtgactacttgaactacacaaaattgtgaaatgagaatatctttgattttatacttctatttttttttttttttttgagacagagtctcactctatcacccaggctggagtgcagtggcagtcttggctcattgcaccctccacctcccaggttcaggtgattctcgtcccttggcctcccaagtagctgggattataggcatgtgccaccacacccggctaatttttgtagtttttggtagagatggggtttcaccatgttggccaggctggtcttgaactcctgacctcaagtgatccacccacctcagcctcccaaagtgttgggattacaggcgtgagccactgtgcctggccacttacatctattttgattgacttgaaataaaatttaacacctcagggaaggcaattctcatgtgttttgaattatactgagcattaattcttcaggataattatagacttggaaaggtttaacccagtctcccagtccatgctgaagttcctttaagtgataggaggaactcataatctacaaggcaacccaatccatttggtgctaccatcgattgttataaagcccatccttgggttaaaatctactatttacagttgtatttaatgaccttaattctgccctcaagctatataaaatttggatctgttttctacatgataatcttttagatatcttaaggtagttagtctatcctctctacccttcccctcacagtttttccaccctttgagataaatatccttcgctattccaactatttctcatatggtatcatttttatcatcccgattgctccctaaggatgttaaactttgttaatgtcccttccaaaatgtatttggaactggaaataatatcccttggtagctgaattggatctggatgttgcacatctggacactaatgcagtctgaagttgctgtaagttttttagtcgacttgtaatgttggcttatgatgaatttgtaattaaataaaatcccaaggttttaatctggaggattgcctttaagtgatttcttcttaaactaagtctcaatcttcttttagttatgcaacagattttttttgtttgttttttgagacgctcgctctgtcgcccaggctggggtgcagtggcacgatctcagctcactgcaacctccacttcctgggttcaagcaattctcctgcctcagcctcccaagtagctgggattacaggcatccgccatcatgcctggctaattttctttctttcttttttatttttttttagtagagacggggtttctccattttggtcaggctggtctcgaactcctgacctcaggtgacccaccctcctcagcctcccagagtgctgggattacaggcgtgagccatcacgcccggccttttttgagatggagcctcgctc

SEQ ID NO: 138870 - DNA, 2137 bp, Homo sapiens
accaagggaagttaatagcaaaagtaactgcagggcacatgtatgtcatgggcaaaaaaaaaaaagtaacagcaattaaggtttgcaggtacttagaatttttcctgagccaccctctagagggcagtgttacatatatatctgtaattatccagttacaacaaaaaaagggctctcattcatgcatgaaaatcagaaatatttcatactcttaaagaacacattggaaccaatattatgattaaaacatattttgctaagcaaagagatattaaaaattaattcattaacattctgaacattttttaacttgtaaaaacaactttgatgccttgaatatataatgattcattataacaattatgcatagattttaataatctgcatattttatgctttcatgtttttcctaattaatgatttgacatggttaataattataatatattctgcatcacagtttacatatttatgtaaaataagcatttaaaaattattagttttattctgcctgcttaaatattactttcctcaaaaagagaaaacaaaaatgctagattttactttatgacttgaatgatgtggtaatgtcgaactctagtatttagaattagaatgtttcttagcggtcgtgtagttatttttatgtcataagtggataatttgttagctcctataacaaaagtctgttgcttgtgtttcacattttggatttcctaatataatgttctctttttagaaaaggtggacaagtcctattttcaagagaagatgacttttaacagttttgaaggatctaaaacttgtgtacctgcagacatcaataaggaagaagaatttgtagaagagtttaatagattaaaaacttttgctaattttccaagtggtagtcctgtttcagcatcaacactggcacgagcagggtttctttatactggtgaaggagataccgtgcggtgctttagttgtcatgcagctgtagatagatggcaatatggagactcagcagttggaagacacaggaaagtatccccaaattgcagatttatcaacggcttttatcttgaaaatagtgccacgcagtctacaaattctggtatccagaatggtcagtacaaagttgaaaactatctgggaagcagagatcattttgccttagacaggccatctgagacacatgcagactatcttttgagaactgggcaggttgtagatatatcagacaccatatacccgaggaaccctgccatgtatagtgaagaagctagattaaagtcctttcagaactggccagactatgctcacctaaccccaagagagttagcaagtgctggactctactacacaggtattggtgaccaagtgcagtgcttttgttgtggtggaaaactgaaaaattgggaaccttgtgatcgtgcctggtcagaacacaggcgacactttcctaattgcttctttgttttgggccggaatcttaatattcgaagtgaatctgatgctgtgagttctgataggaatttcccaaattcaacaaatcttccaagaaatccatccatggcagattatgaagcacggatctttacttttgggacatggatatactcagttaacaaggagcagcttgcaagagctggattttatgctttaggtaaactttattataaaaccaataaatagcttcccaagtatgccagggctcataaaaagtaaatagatgcccttagccccctgaactggtaaatatttaggtataacttggcatgattatatatatatctgtattattccgtgaactcttatgttgaacctgtaatgtaactactgaatttatgtgaaaaagactaccatattatgagtcatgcttctcttcatgtaattgtttttaggaagtagataacttgcaaaagatggtagacatccccaatagcaaaatgggtctaatagtaatattaaccatcatttattgagcacttactataagtgctcaatacatatacttcatgcattttctctaagcttcacaatagctttgtttgtttgtttttgagacagagtttcgctcttgttatccaggctggagtgcaatggcgtgatttaggctcaccacaacctccacctcccgggttcaagcgattct

SEQ ID NO: 138871 - DNA, 1065 bp, Homo sapiens
gtgactcagtaacaacatccactctttaagtaacttaggttaattgttaatgagtacagctagattcaaaacagttcagatttttgaagcacttaacctttttcttgcctattttaccttgcatcgtttcaaacactacaaaatacatactcattgcatttacaattaattgtaagattctgaaagtgatttttcagtgcctgaatacttcaaaaaatcttcccaaagcagctttgctttgctggtttgtttttattctttcgcttgctccttaattttttcattttaactatattttgctattgagttgtgataatgaaaataattgtttaaattctatgttctttttcctcaccaatttttatttcagatgataccatcttccaaaatcctatggtacaagaagctatacgaatggggttcagtttcaaggacattaagaaaataatggaggaaaaaattcagatatctgggagcaactataaatcacttgaggttctggttgcagatctagtgaatgctcagaaagacagtatgcaagatgagtcaagtcagacttcattacagaaaggtatgcattgctgtttttaaaaagcaagaaagggccagatgtggtggctcatacctgtaatcccagcactttgggaggctgggacaggtggatatggacattttttaaacgtaaccttaatgctgtgtgttagtctgctcaagctgctataataaaattccatagactaggtgtcttaaacaacagacttatttctgacagttttggaggctccaaaatcaaggtgctggctgatttggttattgatgagggccctcttcctaccttgcagatggctgccttctcactgtgtcctcacatggcatgggttgggattggatgggacaagatggagcaagtactctggtctcttttcctctacttttaggaacactaatcccatcatgggggggtctcatcttcatgacctcatctaaacctaattacttcccaaaggcctcatttccaaatatcattacattaatcatggaaaaaagattaaaaatatgagttct

SEQ ID NO: 138872 - DNA, 2368 bp, Homo sapiens
catcttgtcccagagcactttgtacataactttattatagcacttatcactttgtactttgtgcttaacctcctagcctcatcttacatcctctcccactagcgtgtgagctatttaagagcagatgccacgggtgagtcatcctcatatctcccggcacttgttgggtgcttggcacgtagtaggggctcaataaatgttttcaatgaatttaaacaactaagagagtctaaaactagcataattattttctctttttgcagagattagtactgaagagcagctaaggcgcctgcaagaggagaagctttgcaaaatctgtatggatagaaatattgctatcgtttttgttccttgtggacatctagtcacttgtaaacaatgtgctgaagcagttgacaagtgtcccatgtgctacacagtcattactttcaagcaaaaaatttttatgtcttaatctaactctatagtaggcatgttatgttgttcttattaccctgattgaatgtgtgatgtgaactgactttaagtaatcaggattgaattccattagcatttgctaccaagtaggaaaaaaaatgtacatggcagtgttttagttggcaatataatctttgaatttcttgatttttcagggtattagctgtattatccattttttttactgttatttaattgaaaccatagactaagaataagaagcatcatactataactgaacacaatgtgtattcatagtatactgatttaatttctaagtgtaagtgaattaatcatctggattttttattcttttcagataggcttaacaaatggagctttctgtatataaatgtggagattagagttaatctccccaatcacataatttgttttgtgtgaaaaaggaataaattgttccatgctggtggaaagatagagattgtttttagaggttggttgttgtgttttaggattctgtccattttcttttaaagttataaacacgtacttgtgcgaattatttttttaaagtgatttgccatttttgaaagcgtatttaatgatagaatactatcgagccaacatgtactgacatggaaagatgtcaaagatatgttaagtgtaaaatgcaagtggcaaaacactatgtatagtctgagccagatcaaagtatgtatgtttttaatatgcatagaacaaaagatttggaaagatatacaccaaactgttaaatgtggtttctcttcggggagggggggattgggggaggggccccagaggggttttataggggccttttcactttctacttttttcattttgttctgttcgaattttttataagtatgtattacttttgtaatcagaatttttagaaagtattttgctgatttaaaggcttaggcatgttcaaacgcctgcaaaactacttatcactcagctttagtttttctaatccaagaaggcagggcagttaacctttttggtgccaatgtgaaatgtaaatgattttatgtttttcctgctttgtggatgaaaaatatttctgagtggtagttttttgacaggtagaccatgtcttatcttgtttcaaaataagtatttctgattttgtaaaatgaaatataaaatatgtctcagatcttccaattaattagtaaggattcatccttaatccttgctagtttaagcctgcctaagtcactttactaaaagatctttgttaactcagtattttaaacatctgtcagcttatgtaggtaaaagtagaagcatgtttgtacactgcttgtagttatagtgacagctttccatgttgagattctcatatcatcttgtatcttaaagtttcatgtgagtttttaccgttaggatgattaagatgtatataggacaaaatgttaagtctttcctctacctacatttgttttcttggctagtaatagtagtagatacttctgaaataaatgttctctcaagatccttaaaacctcttggaaattataaaaatattggcaagaaaagaagaatagttgtttaaatattttttaaaaaacacttgaataagaatcagtagggtataaactagaagtttaaaaatgcttcatagaacgtccagggtttacattacaagattctcacaacaaacctattgtagaggtgagtaaggcatgttactacagaggaaagtttgagagtaaaactgtaaaaaattatatttttgttgtactttctaagagaaagagtattgttatgttctcctaacttctgttgattactactttaagtgatattcatttaaaacattgcaaatttattttatttatttaattttctttttgagatggagtcttgcttgtcacccaggctggagtgcagtggagtg

SEQ ID NO: 138873 - DNA, 1591 bp, Homo sapiens
ctggaattacaggcaggtgccaccatgcccgactaatttttttttatttttagtagagacggggtttcaccatgttggccaggctggtatcaaactcctgacctcaagagatccactcgccttgccctcccaaagtgctgggattacaggcttgagccaccacgcccggctaaaacattgcaaatttaaatgagagttttaaaaattaaataatgactgccctgtttctgttttagtatgtaaatcctcagttcttcacctttgcactgtctgccacttagtttggttatatagtcattaacttgaatttggtctgtatagtctagactttaaatttaaagttttctacaaggggagaaaagtgttaaaatttttaaaatatgttttccaggacacttcacttccaagtcaggtaggtagttcaatctagttgttagccaaggactcaaggactgaattgttttaacataaggcttttcctgttctgggagccgcacttcattaaaattcttctaaaacttgtatgtttagagttaagcaagactttttttcttcctctccatgagttgtgaaatttaatgcacaacgctgatgtggctaacaagtttattttaagaattgtttagaaatgctgttgcttcaggttcttaaaatcactcagcactccaacttctaatcaaatttttggagacttaacagcatttgtctgtgtttgaactataaaaagcaccggatcttttccatctaattccgcaaaaattgatcatttgcaaagtcaaaactatagccatatccaaatcttttccccctcccaagagttctcagtgtctacatgtagactattccttttctgtataaagttcactctaggatttcaagtcaccacttattttacattttagtcatgcaaagattcaagtagttttgcaataagtacttatctttatttgtaataatttagtctgctgatcaaaagcattgtcttaatttttgagaactggttttagcatttacaaactaaattccagttaattaattaatagctttatattgcctttcctgctacatttggttttttcccctgtccctttgattacgggctaaggtagggtagagtgggtgtagtgagtgtatataatgtgatttggccctgtgtattatgatattttgttatttttgttgttatattatttacatttcagtagttgttttttgtgtttccattttagtggataaaatttgtattttgaactatgaatggagactaccgccccagcattagtttcacatgatataccctttaaacccgaatcattgttttatttcctgattacacaggtgttgaatggggaaaggggctagtatatcagtaggatatactatgggatgtatatatatcattgctgttagagaaatgaaataaaatggggctgggctcagtggctcacgcctgtaatcccagcactttgggaggctgaggcaggtggatcacgaggtcaggagatcgagaccatcctggctaacacggtgaaaccccgtctctactaaaaaacagaaaattagccgggcgtggtggcgggcgcctgtagtc

SEQ ID NO: 138874 - DNA, 1051 bp, Homo sapiens
gaccaacatggagaaaccccgtctctactaaaaatacaaaattagctgggcgtggtggctcatgcctgtaatcccagctacttgggaggctgaggcaggagaatcgcttgaacccaggaggcggaggttgtggtgagcgaagatcgtgccattgcactccagcctgggcaacaagagcaaaactctgtctcaaaaaaaaaaaaagatataaatcacaataaataaataggtcaatacaaatgttagccaggcgtggtggcacatgcccatagtcgcagctactctggaggcagaggcaggaggatcacttgagcccatgaatttgaggcagcagtgagctatgattgtgccactgtactccagtctgggtgacagagtgagaccccatctctaaataaataggtcaaacccttaaaaatatttaaattcttaaaaaattgaaaagattattcttctcaaatttagttgagctttctaagagaagcaattggctttttcccacttcaataatcattttcagtttgactcatacagttaacacaatgtgaatttcttcctcagcataacagagttatagaatgacagggctggaagtgaccttagagagtatccagttctttcattttacaggtgaggcaactgagactcaaaggtgatgtaatttgtgcaaagattatagctaattagtagcagagccctgactgggacatagtttgaaggtgaaaaacttcaccaagctacctttcttgaaaggtccaaatgtttatgttttcaactactctttccactgtaccataactttcactacatattaaatgacactttataactaatataataggacaatcatcaatgcatatatagccagcccttcatatctgtgggttttgcatccatggattcaaccaaggaggaattgaaaacactgagaaaaaaaaaaaagaccacacaataaaaaaaaaaaatacaaaataatacaaagaaaaagccaaaattgtcatactgttgttaagcaacagtataacaactatttacatagcattaaggttgg

SEQ ID NO: 138875 - DNA, 1322 bp, Homo sapiens
cactgctcccggccttgtgtgattttatctaagggacttaagcgtcctcaggtcctagggggtcgtgaaaccaaaaccccagggatagcaagggacaattgtatcttcaaagtagacaaatggcgccgggcacggtggctcacgcctgtaatcccagcagtttccgaggctgaggcaggcggctcacctgaggtcaggagttggagaccagcctggccaacatgctgaaaccctgtctgtacaaaaatacaaaaatagctgggcatggtggcgcatgcctgtagtcccagctactagagcgactgaggcaggagaattgcttgaacctgggaggcggaggttgcagggagccaagatggcgccaccgcactccagcctaggtgatagagtgagactccctctcaaaaacaaaacaaaacaaaaaaattagacaaatgctacattaatgtttgggtggtcagattctactttgaatctgaagtttgcagatatgcctatagatttttggagtttaccactttcttattctgtatcattaatgtaatattttaaattactatatatgttaccatttttctggatttagtaagaaatttgcagttttggtttgatgtaacaagggttttaatgtaatttatgttagattttgcatttttttcattactgttatattttaacctgactgactgatctaattgtattagtattgtgaataatcatgtgaaatgttttgagacagagtactatatttgtgaatataattttatggtttttttcacttagaacctttctgtgtggaaaactaagaaaattgctttctgctgtataatctggcattcattgtagattaaagcttatttttctgtgaataaaacgtattcaataaaatactattctttaaaattatatcatactaccttgtatttgtttcactttcttagaaaaaataaaatcaccctcttaaaaatactgcaatgtaacctcctaaatatatcttatgccattgtacgtaggcgtaaggtacacattaggtcatgccatgttttaaaagaaaagacatcagttttcacattaatgtatggaattctataagtgcatgaaatgtcaatttttaaaatgtatatatatatgaacaatggtaacaccactccctccaaaaagatatgcctggttgtctcaggagatagtatactcactataacagaacttgaacaggcaaatagcaatgaacctaaaaaaccactgcccctttgaggcaggcagcaaggaaggatatttgtgagtttgcggaagcaactgccagtgagtttcagaagctgtga

SEQ ID NO: 138876 - DNA, 1725 bp, Homo sapiens
cttcctagagagggaacaacattcatgtgacgggcccctctgcttctcccccgccccatcatctccagcgcgtggtgggggaactgctggggaaggcgattggcatcgatctctccatcccttccgaggcccgacttcggtcagttttcttcgggcaacaattttctaaattggctggggtctggcggtgttggcccccgcgcgcagaccttgccccgaagggggccctgcctgcctggcatgggcggaggggggaagggcgggagtggaaggctgtttgttggggggttttggcgccacttttgttttagttttagtgctgcttttcattcccacccccacccgcactgtctttctcaaggcacgaactgagctgatccttgccccaggtaggcagcctgtgcgttttcactccacacttttattcttgctcggggtcgactttcttttttcttctcccctggatccggagatctgcggacggcgattttgggacgaaaagggtcggatgggccgtgggagagagaaggtgtgggaaacagcatcaagtagttccgcaaaactttgagccccgttcccattttcttttggcctagaattgtgaacgtattgttgatttcggcctttttttccccccgtcgcgagaatgtcttgttttgcctttagttttttataaaccgctgtactttcgacatttagtttccgctcccccttggtgcatatgtcattttatttttaatccttaactgtaatgggttatcgtgtgattttcgtgcttcagtgctcggctttaatttttaatattgtattagtagtttcatccggtttgtgagactttctcttccgtggcctagaatgttttttatgttgttgcctaccacccctcttccctctccctccttctttctcttggatgtagtttttaaattgagggccatggtgttggattaaatggtaatttacagtttacatgatatatctattggaaacttttgatctgtaaggttagatttaaagtaaacgaggcgcttgtgttggtttgcaatggttccttaaaatgcgcgggccacccccttctcccaccataaagccccatcttcccttcacactggagtgtaaattccataccccttttctcccacggaccgccgtatttcgcagcagccacaccctgtatttgtctctgtggattggactcattatcagcttaatttagtgactcttaaaccaccatgatgggacttgcttaagcacgaagcttcttttcctgtttagtcctagtggttagtgtcgaaagaggaatcatcgaggtttcttgatgaaacctagtgcggtccaacctctgcctttttttctgttgtcttttttcctactccgggctgttggcggtgtcagcaccgctgctgggggcgggggtggaggggagaaagagtcgggttaccgaagtgcgtcattcctggctctagcagggcctgctcgggagctgctggtgtttgttactgtcctcgcagcacttttctgccaaccttctctctctgcgtattggttaggagcaaaagcaggaggcggtctcctaattctgtctgtagcctagcgcgttgcgtttaagggtatatctgaacttattttgttaaaaaaaaggctctgggaagtggatgcatttgtttaatgacatataattcaggtagtttaggcttgctctcatatactttccgatgaacagtg

SEQ ID NO: 138877 - DNA, 1993 bp, Homo sapiens
ctgtatagttacattgttggattttgacttaacatgctagtttttgatacttttgctatctttgggtagaagtgtacttagagaacatagtatcttcctcttaattctttttgaagataataatgagaggagggagtgggtaggaggtaggtgtgaagcagaagtggccttgagttgattattgtagctggatgaatacagaagcgctcattgttactattattctctctacttttgtgcgtgctgttaaacatttccatagtttaagataaactttttttgcagtagaatttccagattgtcttacagtcttgggggtaatgacttaagtttatatttacatgtcaaaattacttgcataggaaatttagccttgtgtaagtgattacacaatgcttggcaaaactttcaaaaaaaaaaaaacgtttaaacgggaactagtataaaacaggcaacataaatacttataaattggttgaactttaaatgtttataacttagcctgaatgtgctctacttttagtttcctttttaattctttgaaaacaggaaaattccatttgcaatttttgtaaattctgcttagtgtctatttcatcaagttggagttacagtgagtcagtatgaaagggatttactattaataggaggggctttggcagttgcagtaagtgacagtggaagggattgaggtaccatagggagcattcctggtagaaagatctaggtagctgaattcagtttcagaatttggtgtttaatgactaggtagagaagtgggttggaaaagaaatgtacttattagctattccttcccactgtgaagtaactatagtattctaaggtgtatcagagactggcagagagggtggagtgggtttttttttttttaactgataagaaaatgagtgtttacatttaaaatggtttaaatcacctcatgccccaaggatctggtgctataactagttagaagttgatatgtaaaatatttcaatattgtctgttaacattctgaccattacccgtaaacagtaaaaatgtgttgcaatgacaatccttggtctcccttaattagtgcatttgtgaactgctcctaaattctattaaggtaagtgccttttttttttttttttttggcagttctatactgttcagtgtcaggtttatttttttcccccaggagatacattttaaaaatacatgtcacagttccgaaaggaatccaaaacaatggatatttaatttatagcaaaatttcaccccaatctgggaacagacattttgtaactgttaccattagtctgtttgtgtatttcatattcaggattttagctttagaaggatgttaaaggaaaataggtgacatatttcaaatttttattcatatacaaatattcttagtagatggtaaggattgtggcatcagatttattttattgtggtgaggcaatagctaaactactacactaacacatgatgagtttggtaactttcaagtatatttagttaggattttttaaagcccaaatgctcaaataagattttcatgaaatcaaattctacatttctttttcaactgtattgacttctgcggtcacctgaggacttatgaattaaagtgaatgggatgggcttgggggacaggctaaggctcagatctattcctttgggaatttagggttagatgtgaaaatatgcagtttagtaatgcttaatattgtgcatgtttaactgataccacccacagtcatatgtgggaaggtagtaaacagagaatagcataatctttctgcttcgggttctttataatagatggcagacttcagtttttgatgctgcaagttgacttttgaacttaaaccaaaatcggcggggcacagtggctcacacctgtaataccaacactttgggaggctgagaggctgaagtggggggatcacttgagcccaaggagttcaagaccagcctgggcaacatagggagaccccat

SEQ ID NO: 138878 - DNA, 1029 bp, Homo sapiens
ttcagtgtaagtggtgttgcttagtggagtctaatttttgttgatgtgccttttaaaaatctatgcatcttcagcagctgtggtaatctgctacctgaattgtgtttttaatgtgtgcttgctatagatctttgatactcaccagtagacaccaagaagtctttacatatggttattgtagtaagtcaagaagagatttatttattttttgagacggagttttgctcttgttgcccaggctggagtgcagtggcatgatcttgggctccctgcaacctttgcctcccgggttcaagtgattctcctgcctcaacctcccagtagctgggattacaggtgtccgctaccacgcccagctaattttttgtgtttttagtagagacagagtttcaccatgttggtcagggtggtctcaaactcctgacctcaggtgatccacccaccacagcctcccaaagtgctgggattacaggcggagccaccgtgcctggccaagaagagattattgaaattgttttccattccttctgccgaagaaagagaggatgaataatgtcaatggtgtattttttttttttttttttttttttttgagacggagttttgctcttgttgcccaggctagagtgcaatggtgcgatcttggctcactgcaacctccacctactgggttcaagcgattctcctgcctcggcctcccgagtagctgggattacaggcatgtgccaccacaccgggctaattttgtacttttagtagagacggggttttttccatgttggtcaggctggtctcgaactcccgacctcaggtgatctgcctgcctcggccttccaaagttctgggattacaggcgtgagccactgcgcccagctggcctattcttttttattacagtcatgcattgcttaacggcgggcataccttctgagaaatgcatctttaggtgattttgttgtgtgagcatcatacagtgtacctacacacacctagatggaatagcctactatacatctatgccatatggta

SEQ ID NO: 138879 - DNA, 1881 bp, Homo sapiens
tgcctgaggtctatattgtcttttaatagtaatagaagtagttgaaataaatctgagcattggttttgtttgcatatgcttattaaagtttgtgggataatgaattgtattcttgaattttttggggggggaatcatgtgatacatgaaatggtttcatagatattttttcttttaggtcatttatgctctatttaaaatggagattacatgtgtctgagaattgttccccagtccttcagcttgttttactgagtggttagattcgaagtaaaaagtttaggctaatctttaataattcagcgctctggttctttaggggtattttttgttatttaattgtaccttaaaaattcttttttattctgttaatatctcctgtttgcttatacttcctattttagttcatctttcactattaagttttcttgttcttactgttatcaggtgataaatagttaatatcagggccccaagttattaggttcattagtgatcggtatcttagtctcagttttctttttcctttctgttttttttttagatggagtttcgcgcttgttgcccaggctgtggtgcagtggcatgattggctcactgcaacctccgcctcccaggttcaagcgatttcctcgcctcagcctcccgagtagctgggactacaggcgcgtaccaccacacccggctaattttttgtatttttggtagagacgggatttccccatgttggccaggctggtctcgaactcctgacctcaggtgattcacccatctccaccccacaaagtgctgggattacaggcgtgagccaccgcacccggtcttcctgtttttttttttttttttttttttttttaattgtaactgaagttttttttatctgaaggaattctggttgttggacttatgacctaagataaatttatggagacaaggaaaacaaaatatatatatttgtgcttttcatagccatgagtcaaatttatatgtttatattgatcattcctttaagctttaacatgtaggaaatacttttttcccaggtgatgaacagcagtcttatactcagactctttgttcattgaggagtcttttcatccatatttccccctttgtattccaagaaaaccaagaactggtgttccatgacagaattattccccgaggcatccattgtatattataaattagtttctcccctgcacatctagaaagatattagttaggtatcattcttgggagacttcaggaatagtcactgaagtcattttctgagttctgtagtcaagtcattttctgagttctgtagttaacatgaggaacactggttgagaaaggctgctagaatattaagggacttggtttggcactaaataaagttttacttttcactgtcactttcctgttagtaactctaatatggcctctattaaaattcgtgatacaatgtgaatgctgttgatactgctattgctgtgggataaattggttagtgttgatttcaagcagttagtgctgcttagttgtttgaaagaatttaatgtgggacattaaatgcatcattttatttataagaaggaatattgtgggagcactgttcattatacagttcaaaatctataaaaagtcactgacagtgactaacatgaacaagaactaatactaactgaactcttaccatatgccagatactcttaaaaatgctttgtgtgtattagcttactttatcttagtaactctatgaggtaggatgaccatatgatttattgttcaagccaggatacttttgaacgtgaaagggattgcttcttggccttttggctaagatcaagggaagagtgagtgaaagggggcactcactgaatggcatgctgagataata

SEQ ID NO: 138880 - DNA, 1051 bp, Homo sapiens
gctcaagagccctggttacaggatcttctggggtccaaataccctctagaggttttccgttggccacttggtgtacaccccatgcaaatgaagtagtggcctgtgatcagtctgattgattgtggaaagcaagcaattgggggctgaagtgaagttacaaagttacgctcctatgcaaactttgtaactatacaaagtgatactcttaagaaaggtactttcagttttccctctgccacacagaggtactttagtatggagagttacttaggtatggagggttgaggttttccttttgatttagttctaggaagtcagggtgaataggccttattccacctgcctccagaccccattctcttgcctcaaaagaacaaactttactatgtacatattttgatggtgtcttttcagagttgtgtttaagatgcagtttttgttctcaatgtccacagtcttaatacagaaggtagctaatgaaacaaaaatactagaatagagtcattattgtaatgatggaaacttacataaagtataggaacagaaagaggtagtgattatctcagagatttcaaggagtgtgtcttacagaggaggcgtagtgattgaggttcagtagtttatcacgacattccaaaccacctgacctccatctcgcataactctaactgctcttagttccctggggacaccaggctgtttgcctagatatttctttgcttgggctgtttctaatgcctagaatattcctgtacccacttgccagcataacagtacatgtccttccagatttagattgaggttacttgaaaaccatacctgaggtttcctttcccagaagagctactttctggtgccctgaggcttcctaagcatattcatgccagtgtgctttcagtgtaccctatagtaatcacttgtgtgacaccttcactatactttaaattcactggggggagagagtatgttttattcattttccctgaacattttattatgaaaaactccaatgtacataattgtatagtgaatactcatatacctatcacct

SEQ ID NO: 138881 - DNA, 1046 bp, Homo sapiens
ccactgtactccagcctgggcaacagagtgagactccatcaaaaaaaaaggaaaaaaaaaattgtaagcattaatgttgtaaataagagctttggcattagatttaatcaaatgatgcctgtgcgacctttggcaggttgttgtcttagtgtcagttgtttttttttttcttttttcctgagacaaagtctcactctgtcgcccaggctggagtgcagtggcatgatctcactgcaacctctgcctcctgggttcaagcaattctcctgccacagccttccaagtagctgggattacaggcacccaccaccacacctgaataatttctgtatttttagtagagacatggtggggggtggtgggcggtgtgggtttaccatgttggccaggctggtctcgaactcattacctcaagtgacccgcccaccttggcctcccaaagtgcggggattacagcaggtaggcgccactgcatctggccagtatcaatttcattatctgtaaaatgggcctaatagtactttactcataaggctgttacgaagattgaattgagtaatgtttgaaaattgcttaacattttatggttcccagaacatagcaaggacttaataaatggtagttattattgacaaaaatgaaaatgtcaaggaaaagtataagaacatatcctggaatgttgtaaaaggaaggtttcagcaatatttagggaacctgatagctagggcaaaggagtatatagatacttttattgtttaaaaactcttaagaacaacaaagattacatattagtttagactgagttgtcccccccttacctccctagggctagattgagttgattatttcattgagctctttgaagtattgttaccaataaatacatacatagatttactataaattaagcttcttcaaggaagggatttgggtttgtttgggtcacggctgtatttcagcaccagtacttttactcttccaaaatttttcgctgtgggttttcaagtagaaaatgttgtctgatttgagttttatttggtcttttt

SEQ ID NO: 138882 - DNA, 1022 bp, Homo sapiens
aaatataattttggtttggtttgggtttgcttttgctttatatctgtgcttatcacaaggatgttttgttttgatgagggaggcttttaaaatttttaacctgagtaattggtatatattttcattgattaaagtgaattcagaatatctatcttgatcttaaataaagagctgaagtgttcagaggtacccctacctttatatattgttctcttgcctactttgaggatttattggagaagaaaggtgagataaagataccttttcatgcttttgtctagggtatttcaaaagcaagtgatatgttaagtcatgcattctaaatgaaattgctgttttaaatttttgttttaggatagtggagattatccacttaccatggctggtcctcagtggaagaagttcaaatccagtttttgtgaattcattggcgtgttagtacggcaatgtcaatatagtatcatatatgatgagtatatgatggatacagtcatttcacttcttacaggattgtctgactcacaagtcagagcatttcgacatacaagcaccctggcaggtcggtatttagaaatattttctgcatattgtcttagatttgagatgaaaaagattctcatttaaagagaaaggaaataacagagatacaaattaattttatttataaagtgaccactaagaggacactcccccatccctcctgcgaattcctggaaatgggatgataatttcagttttgattttgtgaaggtatactataactagtatttggtaattttcttgtatactatgcatactgtgccacagcaggggagaattggacaataggtatgtgttgggttcttgaaaaatactatgccacagcaagggaaaattggactataggtatgcattggattattgaaaaataccatgccacaagaagggaaaattggatgataggtatgtattgggtttttgaaagatatgttaccagggaagatattgacagcagatttggagatatcatcacagtcattttg

SEQ ID NO: 138883 - DNA, 1060 bp, Homo sapiens
actaaaatttactttagaaggtgaatcatgatctatgaaaatgattattttagaggacatattatagaataatgggatttaaggatagactggagtcagattgccttggtttgaatcctggtttgactgcttatatgaactgaggcaaattttaaaatttccctgagcttcaattttgccgtgaatgaaatgggtataatacttacctttgagagggccattgtgaggattaggagataattcctgaaaagttattttattttatgttattttattgtcatttgtagcagctgcatctttcttttgttagaagcagattagctcatttctgcttaatatttctatttgatcttaaattgtaaatttttgtgtctgttagattagtttcaccatacttttactctttaaaaatagctatgaagttgatgacagctttggtgaatgtggcactaaatcttagcattaatatggataatacacaaagacaatatgaagcagaacggaataaaatgattggaaaacgagccaatgagaggctagaactcctgctacaaaagcggaaagaggtaaacttttatattgaatatttaggctattgtgtgaccaacttggtcaccattaattaggatataactttgctagtggctcagataattgtttttgaaatatttaaatgtaaataacatttcaaactatttgcccaacaaaattctgatgaatatccgtgccaacaatactgttttcttattttcaacctgcgtggactagtattaagagtggctttaagtaaggggactggggttagtctgacaagttgtcttaagctttagtattattcatctctacggtgaaaaaccttttgtcaggatgaaaagagatttcacaattaaaatcactttggaaaataaaatcactttgaaaaataacataagctgtttattggcatctaaatcagtgttttttatacagtagaaggcatttgtttaacattaatgactgaccaccaaattcaactctgaatgaggaaaataattttttcagccttatgcgaaataacagt

SEQ ID NO: 138884 - DNA, 3555 bp, Homo sapiens
tggttactgttgtctagtataattcaaaattccccaaaatactggggaattctgctttttttgtgcttgtaacaacttacaggtgttcatttggttgtcttcctttacaattgaaaagaaatgatgtgtttttttacagcttcaggaaaatcaagatgaaatagaaaatatgatgaatgcaatatttaaaggagtgtttgtacatagataccggtaagttgtgacagtttttttcataaatagcattatgtaatttctactcagcaagtttgcatatttcgtggtgtagggaatctaaattagcaggaagaatgttatagtaaaatcaatgttagactccattagtgccactgagtcactctgggcaagttatttaactcatgtgagtttggtgtttcccatctgaaaaatgggataatgctgtgcttgacttgcagccagtagaagttactgctatttggagttgggctacacaatacttaattgcctttggatgcactatgttagtagagcctgcacgtgctgactcctgactctcttcccttccattgaatatcagtgggaacaattggataggttaaagtgagatattttcttttgctgttttgaatgaacagaggaaagaaatagtaatcttataaatttatgctgtaacctattcttaaattttggtagtatttttattcagcttccacatatcctcaacttggcagttactgaatcaggttaatgcttactttttgtaatgtctccatgtccattcttaccttttcacttctattgtcaccattaccttagtctgtttcctcattctcatgcctagagattattgcagttttgccaaaatatccttttattgtgttattcctctgccttcaatgactcaccagtacttacaagatgaatttaaaatcatttattctaacattcaaatcccagttgagcttgacctcagtgtaatgtataaataatacttacctggaaattacgctctagccagacaagtgtgcctgctgtcttctgaacacaccatgcccagcaggtgtgagcaaaggctgggatatggtatggtataaaaggtggggatgggattttgtttgtagttttatataattttaaatgtttatgtgttgataattatgctttgccacctaagcttttggcattcaggcccatgcttcatttctattttttaatccctagtaataagataatgtcatattcatagtagatctgaagtacttggcatctcttgaataaaccataagttttgtggtatattggcactaattatgcatcgtttttccttcccccattcagtgatgcgatagctgaaattcgagctatttgcattgaagagattggcatttggatgaagatgtatagtgatgcctttcttaatgacagttatttaaaatatgttggttggactatgcatgataaggtaagatgtgcccttcagactgcttctttctacacatcggcgtggctgtctgcacctctcattcatgagttatctcccagtatgtatacctggtgacacatttctggaagcctcccctttattcttttctatcttctctgtaaaaacttattttctatcacataaagtctgctagatatttttgaatcctggccactgatttaaccattaatggtgaatcatttttttgctgaaatattacagtcatgaaggtagtaggagtgaggcatttcttagggcacgaagaagaaccattacgctgttgttatctgagagctatatacttaaaaaaaaaattattcaattttgatcctctcttttgacaaacctgtatcttagccagattataccttactacttggtttctgacctttttaatatgttttcattaaactaccattctcttaggctgcctcttcacttgccttgaagaaattgattgtatataattctttccaaacattacttcccatagtggaaaatatactgtgacacatgcttctattgtttttcacaatagatttgttctgaacaaattttcaaaaattatcctttgaactacagaaatagtaaccccataggtatttagtcataaatgtatgtactgattactatttttgcattatcaaacatgatagtttctgaaggaatgctatggtatgaaacatttaaaattttaaagtagaaaatattgtgtacatcttgaatattgaagttgaaaatacatagagttttaatgcattgtctcatctttttttttttttttttttagcaaggtgaagtaagactcaaatgtcttactgctctacaagggctttattataacaaagagcttaattccaaactggaactttttaccagtcggttcaaggttagtattacttaagaatttacaaataacttgtcatttgcaaacacttttctcttgctttccttttaaaaatattttaatttttttgtccttaggatagaattgtgtctatgacccttgacaaagaatatgatgttgcagtacaagcaataaaattactcactcttgttttacagtaagtatgtatttgttgcatatttgcactaatgttcagatatctaaataatatattagagtatttggttcagactcatctaggtctaaattttagtagcttacgtcatggaggtttacagctagaagttgaatttcttcatgtatagttgagaaaacacaggaagaaggaaccatagaatatggaaattcttttttttttcttttttttttctgagacggagtctcactctgtcccccaggctggagtgcagtggtacgatctcagctcactgcaagctccacctcccaggttcacgccattctcctgcctcagcctcccgagtagctgggactacaggcgcccgccacgacgcctggcttattttttgtatttttagtagagacggggtttcactgtgttagccaggatggtctcgatctcctgacctcgtgatccgcccgccttggcctcccaaggtgctgggattacaggcgtgagccactgcgcctgaccgaatatggaaattctaactgagctaggaattcatgtgttcccattctcttggcagattgatttccttcctgtttttctgtttttgatgctcttgaaataagcacatcagtgtattaaaaaacatgcttattgtattttgttacacttttagagtatgagcatttataagaatgtctgttatacttctcatagcacctttaaacaatctgaatttaagacctattctgtgttaatatctgatagtgatgttattcatatttttcctttttaaaaaatggtagtaaaatatagattatgtaaaattcaccattttaaccattttaaagtatggtttactgtcattacctatatttacgttgttgtacaactgccaccactatccattgtcagaaccttttcatcactttattctggagctctgtacccattaaacactgattcttcattgtcccctttccccagatcctggtaaccactgttttattttctatctctatgaacttgcctattctagatatttcgtataagtgg

SEQ ID NO: 138885 - DNA, 1055 bp, Homo sapiens
gttcacagaaaacaaagattgttatataatggctttcaaagagactcttttgagccatatagattaaacttttcttgttcctatgatgttattaaaatgcctgttgggggtgcagcaattattaggaagagtaggtggtataaaacatttacactacagttttctattcattgctgtttagtgttaattctctttgttgtttatgaggaaaaatgctcatgctatccatagtaaaaggacagtaagttggggtaattttgccagaaggatggaaggaaagtatatgtttagttttcaagatgaatatgtatcatagattttttagcataaatggtgtagctttgtcaatgtactacttttatggaaggcaacagttatataaaatacagtaaggtttttaaaaacaaatagtttataactcagtacaattaacttgagaaattagtttaaaaggacttagaattaccatcaaacatgaaatgaaaaaggtttatagcaattatttgcgtggtgtgccatgttggatgatattgtacctacccagttctcctttactcctttgttagatccttagatatgaaattgaaacagttaatttttttattagaaaattttttgttgttgttgtcgtaaaataaatattttacttttttcacaggctcttcagtcgtagagatccagaggaggatggaatgatgaaaagaagaggaagacaaggtccaaatgccaaccttgttaagacattggtttttttctttctagaaagtgaggttagttgatagtatttattttatacttaggttcgaaaaattttggaaaaggggttaaaatgaggcacatttaaaaaaatattccttgtagcacagtaaattgtgaatagaatggagagccacccactcccccactcccccaatttttttttttaaatatgctttctacttttcttctttttttttttttttttttttgagacggagtcttgctctgtcacccaggctggaatacagtggcgccatcttggctcactgcagcctctgcctcccaggttcaagcag

SEQ ID NO: 138886 - DNA, 1032 bp, Homo sapiens
aatacataaattagccgggcgtggtggtgcatgcctgtagtcctagctacatgggaggctgaggcaggtgaatcatttgaacctgggaggcagaggttgcagtgagccgagatagcaccacttcccaacagcctgggcgagagcgagactccatctccgccacccccccaaatatatataatttattataaatatatatattttatataaaaataataaaaaatttttttcatattaatgttttaatgataattgttaatgtgtaatgatgctacctaacacgtctttcttacagcaagcaaactaaggcagtttcttctctgtcctttcatctatttgacgtcaaaaaatagattgctgtttgagagtttgtagatgatgtcaataaagtttccattcttttgagttaaggctagtatgataattgtctaagaccacattgctctttttaaattttagttacatgagcatgcagcataccttgtggatagcatgtgggactgtgctactgagctgctgaaagactgggaatgtatgaatagcttgttactggaagagccacttagtggagaggaaggtaaggatgtttaattatgatatttttgtttagacagttttgtaagtagatttttactcattccatttatttgtccttttagttttaagacaatttgatagaaaaatcttacttcgtgcatagttttgttttcatataaatattatgctatgtaaaaagatgtaattgctgtcaacattctttatttttttgtatctgggttattttttttacccaaatgtatggatctgtggtggatagatttgggatgctgagggttttaggaaggtgatgttttctgtgataaagtaatgggattttctttagtaccttagggcagattctgtttacaggcagaagaaactgttatgtaataattacaagtggcatatagggagaagaaataagctaactctttctgactttttttttttttttttttttttttagcactaacagataggcaagagagtgct

SEQ ID NO: 138887 - DNA, 2521 bp, Homo sapiens
ttagaggtaaattttaaagcattagcaatttgagaaatttgagttctctgtaatatacttttttagttgctgcaggagatatgattgacagtccctgccttcatgactgaatgtagcatacaccatttggaatggtgcagttgtatgttttatttatggatttgctttctatttcttctaaaataaaatcagaaataaaaatggagataattttttattaaaatagggaaatttctatttcctggaatcagattttaatgcattattgtaaagtttacatgaacttgcattttataccaacaattccacaggctttcaaacttttgactgtaaagcataaaaattcattcttatattgtgacgtattacacatgaatatgtttgtgtgtgcataactgaaacaaaattttatcaaagacaatgtgatgctttctgtgttttctatttctgttttttaaaaatttctgtttcttttttgctaattgctgatagcaatttagtgttttgaatttgttacttatgtgtcatgtcccacagcctagagtaagcagaaatgctggtcaatcccagtattttatatataagctcttaaactatatttcctatttttaactgattctcctaccatctgaaggtagagttggttagtcttattggatattgattttccctataggactatccaaatttttttttgttatttcaggtggctttttgtttttataatgtgtagttttctctttcatgtcacttttagggttaatgttttatagtgaaatttttgtgtccatctcttaaaatatagttttagtaatcattttgtatgttttaactaaaacttgaacacttaacagtgctaatgggcttaataaatacagaagtctttctgttcctttaggtgcttacagcaaaggagaagaagacacagttggatgataggacaaaaatcactgagctttttgccgtggcccttcctcagttattagcaaaagtaagtttgtgtcaatatcatagtgttactaagaaatgagttttttttccctaaatgcctcacagaatattataatgctttcttattgtgatatttttaacgtgatctttatatttcacagtactctgtagatgcagaaaaggtgactaacttgttgcagttgcctcagtactttgatttggaaatatataccactggacgattagaaaaggtaagattattttgtgtaaaaaaaacctttaagaaaaattattcagttcattatatcatagcgtttgtttatatttcttaaaatgtttttttggaacgtattttaagaaaggaaacctatagcttaggtcttctgtactttagtttgacttacagaatggcggtaatgatgcttccctttgcttcatgcccacaactgtaccttcattcttagctattatatgactatgtcactgatcatttatagagactgggggtggataactagataataacaattagatgagattgggctcattcagggtggtatggccatagacgataataacaattataagacaaaatcaactaatatttattgaacacttttgctatgttctgtggattaatgtaagctcttagtatatgttagcattctcaccatagccctatgaggtaggtaatatctcccttaaagttgaggaaaaagtatggatggatcagtgtatttatttatcatgattagaaaagcaccttaaaatgtacgctctgtgttgtagacttactgtatttgaaaattttttccatggtggtatggtcatgtagtcactttatacctatcatatatgccttagttttgatgaaaaatattattattttgcagcatttggatgccttattgcgacagatccggaatattgtagagaagcacacagatacagatgttttggaagcatgttctaaaacttaccatgcactctgtaatgaagagttcacaatcttcaacagagtagatatttcaagaagtcaactgatagatgaattggcagataaatttaaccggcttcttgaagattttctgcaagaggtatatattataactattacaagtattttgtcagttgagcccctctactgcagtaagctaattagtcacccaagtgttaagtcttggtgatagtccctagcagtattttgaaaagatgttcaggcttttcattctatgactcatcaggctactcctccaccaaaataggaaagtggtaagaatctgtgactcagagaaggtgaaagcaaaactaacatcttttttgttttgagaaatgatctgaacagttacctggtttttattgaaccagggctgttaaggaatagggtgttaatggaacagaaaaggagagctagatttagactaggtagcctaaaaaaagtagagtatttctaagtgttttggcagtgtaggttagggaaggacattatgttttttttttttttttggagacggagtctttctctgttgcccaggctggagcgcagtggtacgatctcggctcactgcag

SEQ ID NO: 138888 - DNA, 1046 bp, Homo sapiens
tgtgatctctattctaatacttatctctttaatgttttttcttctgtagagtgaagagtggtaccaagtttatacattatttcatatttgagaatgaataccttggggcattgcaatatagagcaaagtaggggatttggagttagaaaacatgagtttgagtcctgaccctgcatatttttgtagtgtgtaacatattgtacaagtcacttaatgttgctgaaaattaaaaaaaatttgtgaaattactttgcagttagtaaagccttatacaaatataagcattcgttgttacataaattatacttcgcagctttagaatcttaggaaaatactaaacattgatttctcttaagatttttaaatatagaaagttggattctgtttctgtgttaaatatgtaaattatttgtggcagttagtgagaaaccttggattatagcatgctttcctcttttttttttttttaaataggccttcactattctgtgtgatattttgatgatcttcagccatcagattatgtcaggagggcgtgacatgttagagccattagtgtatacccctgattcttcattgcagtctgagttgctcagctttattttggatcatgtcttcattgaacaggatgatgataataatagtgcaggtaattttattgccatctttttattaaatctgtgtccaccataaaatcaaacttaagtaacaatgatgtacatcggtgcactaaaatatattttatccttaaaaacgtgaaacacaggtatatattccagcacaatttatgttcatttttttgtactattgtaaagaaaacgtgatgttgcagagtataggctttcaagtcagatcgctgcttctcactagcactgagtctgctttctaatttctaactacctcataaaactgttaaaaattgagtcaaatgactagtacagtgcctggacatatagcaggtactcaataaaatttattccctcttgcccttattcattggtaataccaatatgcagataatttggaaagaataaagtatttatgtg

SEQ ID NO: 138889 - DNA, 1077 bp, Homo sapiens
tgtttgtgtgtgtgtgtgtgtattgttttaaagaaagtaacagtgacataaaatgtcagtatatctgcacattctcacactttacaacctgcttattttctattcctcaaattaaaagcttggcaaaggaagtagtgagtgaaatttcctaagttattgacttttttattatagtccctcaaatatttatttcaattattttttgttttcctttgcagagatggcatagaatttgcttttaaagagcctaatccgcaaggggagagccatccacctttaaatttggcatttcttgatattctgagtgaattttcttctaaactacttcgacaagacaaaagaacagtgtatgtatttgctggaaatgtcctatttaatttcattttgggattcttaagggcaatttttatacttggtttctctcctttctactcacacagaattgtaggattgcattaatacacaaaaaagtttatacttcagcaactttataatttaaggattataactgtgttttatgcataatactctattttaatattgtgagttttcctccagtataattttggcttttgacacgtaatttgaatactttatgtattatttaagagactggactcactatgttgcccagactggctttgaactcctgggctccagtgattttcctgccttaatctgagtagctgggactgtaggcaggaaccactgcctggctgctttttgtgttattatctgcatttgtgccttaacccaactaaggagggagcatttgaaaaagaataataaaggcaatccatcaggaacatcctttaattctcaaacagggcacttttctggtttagtctccaataatagtgacttataaaagagcccccaaaatggatttaaattctcaaaaatcttctacctttcgccatggctttgaggtgtaaaagggcagaagcgtatggatacctcatattgtaaataatcttgtctgaaaactcactagtattttgcatttaaagactatagattttatatgaaattctaaagcaggcaaaactaatgtatggtgataaaaattacagtaac

SEQ ID NO: 138890 - DNA, 1077 bp, Homo sapiens
ctagaataaaaatcttaccatgtaactcttacttaaaacctttctgtggctccccattgcctgctggataaactcccaacttccttagctcatggcatgcaagatgtttcaaaatatggcccctgccacgttttagtatcatttcctattccctggcagctggtaaaatcatcataaaagaacaagctcaggtgtcactttaactgaagctttggtcatctatgctcccataacactatgtatatccatatttcttatagcacttgccacattgtattgtaaatatttgtttatgagtttgtcccgtttgtctagactgtgagctcctcaagggcagggaccacattcattgcctatcagtgcttggcacgtaaaaggtgctaagtaaatgttcattgaatgaataaatgttcaatgctaaaaaaatgaagtttatcttttaaatactttgtttttactggattatgtatgataactttataaatctttctaaaatcttcattagctttggctctaaaaaacatggcagacaagcagtctttagataatttttttaaatgtcttgattggtatacagggaaaagtgtgatgattatgattaagtttttgagtttgaaagcattgtatttataatgtggtatatgttttactattgggagatagtagttgttaccctcttctttttttaatttatattttgttctgtcttgttggtttttagatgttaagaattttacctgtttttcttacaaaatgatcatttactatgagtggtggcctgcataaattcactttagttatctccatagtggtcttaacctctagagacacaaggtatactctattacacgtatagattctgatcctggttaatatggtcatcatctatattgtcacatagttctatccccttttgtctgtttctgtgaccacattccttttaatataagttcttattttatgctggatcctacaactgatttcttggcttccaagtagtcgccggtccatatattccagaattctgccatgcaatcatttggtctatatctctccccataaaacattacaccagtt

SEQ ID NO: 138891 - DNA, 1399 bp, Homo sapiens
ttctaaatatgtcttagttttgagtttcatagggcacacgaatctgaagtttcagcatgagtgttcctcatttcttcctgaggcagaattaattccttattttagtatgtccttataacacttgatgcatagttttcttgtaatatttatcacattttgtcataattaattgtttatctctgtttgccatggtagactgtaagctccttgagggcaggaatcatgtcttagtcttattcatcttttttttttttttttttttaacatccataggacacagtagaagcctgtcacgtagtaggcattgtgtgagtgagtgcgcgcatgcctggtacacattaggtactgaatgaatgagggagtgatgatgggtaaaattagcattatatattgatgaaaatatatgttttctgaaaatgtcatttttttggtctctgttttatgtttgtttattaatttgtaccctgcctactttcaaaaaggatttgaggtatcttgtatgttcccatgtgggaaattctcattgaaccttgtatatgggatatcagaactataaagctaaatgtactgaagtaatgtagaataaacataactccttagcatttttagacaagtaaacattgggttttgatatcattgatgacataatcaatgcctaatcattctccctgacctttaattccatcattttccattatacttgaatatagagagccacatactgctgcctagatattaatagtcacgacattagttcagatcttgactttgttttatatttctctagtcggcgtggcacaagcctaatggaagatgatgaagagccaattgtggaagatgttatgatgtcctcagaagggaggattgaggatcttaatgagggaatggattttgacaccatggatatagatttggtaagaaacttaatgatttctgtaagattttcagtttagatcttttgaaaattatgttggatatttattagagtagagaaatacttaccaagagaagtaagttttgcaaaaatattaaaatagttgccaggggtttagatatatgggaagggatttagaagagagtaaggttggtgaaggtggtagatcctagattaagatgataacaattgtctgtttgtttctgagattaatttaggaatatataggtttaaagggtatattttgattaatactaatttgactatgaaaatcaatttttatttaattatgcattttaaaaaatatgagttagtataaaagtataccattatcaaaacaatatattaatactacttgttgagacaaattccgtatcagataatgaagtaaaattacttaaacttggaaggaaattaaatacaggtaggagtgtattctttattaataattaaatatgtggttag

SEQ ID NO: 138892 - DNA, 1047 bp, Homo sapiens
taaagtaaaatgaaaagtgagttttccggtttttgtctcttaggataattttccatgagttttttttttgagatggagtcttgctctgttgcccagacttcagtgcagtggcacaatctcagctcactgcaagctccacctcctgggttcacgccattctcctccctcagcctcccgagtagctgggactgcaggcgcccgcaaccacgcccggataattttttgtatttttagtagaggccgggtttcaccgtgttagccaggatggtctcgatctcctgacctcgtgatccacccgcctcggcctcccaaagtgctgggattacaggcgtgagccaccgcacccggctgataattttccatgagtttttaaaatattgtgtcaggtacacttggaatcacatagaccatgtgaagaacttggatattttcagttactatctggtttgtagatatagctaaactaatgtcaacttatttccttttttcctttagccaccatcaaagaacagacgagagagaacagaactgaagcctgatttctttgatccagcttcaattatggatgaatcagtaggtttaatttaaatgtaccctaggattgcaaaatcagaagtataggcagtctctcagtttgaggttgaagacctggggcagcatactgagaatagatgaaaacagctggatgtgagaaaaagaggcaggcaggcaggatttcagtgggaggggaagagagtgctgcaatagtgttgacagattagaaaagtacttttgaatcctggctgactgggacttgaatattaaggaatttggactgttcttccaggtttgtactgttcttcaatgggttgcccattgaaagattttaaataaggtaatggcatgatcagaattgtgtttcagaaagatttccttgacatttatggatgggacaggatgaatgaggggcgtcatataaaggcatggtgaaaaataatgagaacttgaacaaaggctttgataatgaagagaagggtatctagctatctaggatgagagtcagttacc

SEQ ID NO: 138893 - DNA, 1053 bp, Homo sapiens
aattctagctcctcagcctagcaaacaaagccttttatgatctggttcccttgccatcttaaccttggccttttccttacatgtattctatgctctagccatatcaaatcttgtagttccactcagatacactatgctctttcctgactccataactttgtataagcttttttctgccagaaattcccctttatttttcctcctagtaaagtctttctttgatactaattctgacattacctgtggaatttttgctgacttccacagatttttttttctctccttctttaactgtttgtacacactttattgtaataattaccagacttgtgtagtgagataggatattacatgccctggtccttcactagactgaactccctgaggcagtgatgatgttattcattcttagttctgcccagcacaatagatatttagttttgtcaaatgaataaatcatttaaatgccctgccatctccctttttagaatctacccattttatgttccttgttcctcacacctactgcctcaggtgacggttataccatcctcaaaggcctgccttctatgtacaatttctaccattcccaccttgccctctcctacctcataatctgctttcagatagcttttagaactattttgacaaactaattcacactaacatgtttactaataaggccaaggggccgggctcagtggctcatgcctgtaatcccaatactttggaaggccaaggtgggaggattgtttgagcccaagagcttgagaccagcttgggcaacacagtgagaccccatctttacaaaaactaaaaaaattagctgggcatgaagatgcatacctgcggtcccagctactcaggagggcgaggtgggaggattgcttgagcccaggaggttgaggctgcagtgagctgtgttcacaatactgcactccagcctgggtgacagagccgagaccctgtctcaaaaaaaaaaaaaaaaaaaaaaaaagtagaatctgcttcaattggtcttaagtgtggcctgagattctgcactgctaacaa

SEQ ID NO: 138894 - DNA, 1021 bp, Homo sapiens
tgctaggtatgatttattttgatcctctcagcaaccgtgtgagaaaggtaatgggaatttccactttcataccatagcaagctgagactgaagagatcatttagtgactttgctcagttatacagttagcaagtgtccgagtagtaatttgatgccagttccttttgatttaataatctcatgctgtcttctactgttgtgcttcccaaaactaaaatccccatttggatgagaacaccaacaaaagtaattaagaaatcgaaatggttaactgtgatcaaaattaatatgggcagttaggatcaccattttttaatgtatttgtctaatgtcaggagaacttttaacattcgttttcttagttacatactagatttgcaaaaaggtgttcttcagattactaaaataatgaaacagcaatattaactatgtgtatctatttttgacatttaacatttagagaaaaataggggcctaatagtcattttttatttatagtgattttatagcattctcatgtatattgaatgttacaactgaggggcttttatttattcttaatttgataatagtttagctgcttctgctacaaaaattaggaaaattagcacatgtacttataactgtagttttatagcattaccacatgatggcagcagtcacataactgaatgctcagtaatctttaaaggcttaggtgtctttagaagtctttgaccatgtaattttttttttaaagttaacagtttattttttaaatatacactaaactatactccatactgtcttaaccataacttaagaaatggaataatggaaaattttgaatgtcaaattctgtttgcctttatacaataccccacatctgttcttactgaagcccataataccggagtcatctaaacagtagcaaaattgggatttaaattctttaatgtccagttctgagattctccaattctaagggaagtaactcaaagcaccctaatgtagacacttcagtttgttactaaataaattg

SEQ ID NO: 138895 - DNA, 2870 bp, Homo sapiens
tctgcatactcaaatgcctttttgaaaaaccatatccacttcccagcacaaatagccaagtttgcaagactttcttaacccctttccaaggaacctgtgccagaaatatatgtgaagaagcacattcatttattcatttaacaaatacctatgttgagtgcctatgtttagggtattatctagacattagtggtacatataagcataattaatccaaggttcctactttaattatatgtgaggtaagtagcatcttgattagtcctgatgttatttcattatatatcatggtcaatttaattttagaattatacatctgaagagaggggaagttttcaaagtggttttattagcatgttatttaacataataaagtattaatgtaatatttatggatatatttaaagaaatgaatgacttttaacgagattttctcccctctctctctctcattaggttcttggagtgtcaatgttttaataccagtacacaattaaatctgtggtgaagtcattttctaagtggaagaggaaattttaaagtgtggtagatacagtgaaattctgtacagatttttctctaaggagaatatgacatgcttatgcttaccaagatcaagtgcattgaggggcagttttgtttgcctgaataaacgtaaaggacaagtaaacaatttgatgataagctacagtttttcttagaaagtaaatattttatttatgcgctgttagttggcttttgaatcgattatttcatgcttttttttaaaaaaaaaaaaaaacaaaataacaatctgaagaggcatttggtacagatatgaattctcttacatttatttactggttgtactaaataatgatgacctctgctggatttctgtttacatccagaaaacaatgttaaggatgtatttattcccctaccctgaagaaagtgtaggatagaattgtttttagcattctaaatttaaatgcttaaaacgtcaatcaacaaaactttgttttaaatattgtaattgtggagaaaagtaaacttataagcagaacttttacaattttttcatctaaaagtattttaagatatttttaaaatccaagagcttctctatacttttcagaaatatccagatgcagtgaactgccagaaggtaaccagtctcaaacatgcttatcccattatcaaccctgaaagtttgcttgtcctttaagataaaaatgtaatgttgtgatattccttccagtaatgccactgtattttgtctccaaataaaagaagcttattgtagtatgtttgcagaaaaattctaaacaaaaattatacagcttattagagtgtgggaatagggatctaaattttaaataaaattatatatatatataaattggtgctgattttataattgcgcagtttgtttagttttttcttacttttaaattccaacttaaaattatgaggtttcagaaatatattgaaagtttaacaatgtttaaaaatagaaaagcatgagtgttcatgctttaaaatgatttttaaatttgtattttatattgttttatctatctgtctttgcaagcagtcttcaggttaaagatacttctaacaggttacagtacatttcctctgtatgtaaattagatgggataatagaattcataacccataatattctttgaaagctaagctttaaacttcattttatgtcctttcacaaataaattagtttaaaacagaaagtggctacttgccattttgacatcaactcattttgcgaggcttaggcagctagacatcgtttaaaacaaaatattaacttatattacatgtgtatctatctattgtcagtcgtctctcagttcttgaggtatattattttaatcattccatgccttaatatgcttgcaatacaagaatatcttcagatgggtgaataccaaaaggctttcagtttttagtcagaaatcaagcattgggctgtggtagccaaaaaccataggttagctaaaaagatcatgatacaattattttattaagtcatggttaataacaaatgaatccagacttgtctaacagattttccatcaacaaatattgttatgtgcaaaagtattgcctatgttgttttacacaccactgcattaactagaactgctgagaggactgtatatatgattttaaacctaagttgattttttttctcactcttgaaaggagtacttctttgtgaaagcagttcttacagctttgttttcaaccagctaaaaatgttttatatattactctaacctgttgtcctccacattctattgtcctaattgtactgttttctgatttgtatttatgtcttgagacagtaactttttgaataaaaataaacctacagtatgttgtatgttttctcttgtactcaaagggggagggtggctataaatggtttgcaaatttatatctattatcacatcttttaatgtgtttggggaataatttatagagaataccatcagtttatatttttaataaatcatatgtatttacaatgaaaccaaatccctaattggattattactttaaaataggaacctgtaaccattattgctttaattttcatctggtatgagttaaacacatttacaaatgtttacattgtttatacagggtacatttgagtgcctactgtgtgctagcatgtgttaagagatctctccttcatagatccattggggaaaacaaaataatgaaacttgtaataaatgccaggaaggaaacaagcaggatatgctgaggtagagaatgagagagagacagtaagagagaaacctgccttaaataaggggctcatggcatggaggtaaaaccatttgaaaaagaattta

SEQ ID NO: 138896 - DNA, 1057 bp, Homo sapiens
aatcagctgggtgtggtggtgcacgcctgtaatcccagctactcaggaggctgaggcaggagaatctcttgaacccgggaggcagaggttgcagtgagccaagatgacaccactgcactccagcctgagtgacagagtgagactccatctcaaaaaaaaaaaaaaaaaaatctacgaattgccacctgtatcttagcattcattgcatgtatgcatctagtcaaattccggaagccgatttgcctagctcatctacagttgaccatagacgcatgaaggagcccagctaagactggaagaactgcccagctgagcccgaattaaactcacaacctgcagaattgttagccaaataaatggtgctttattaaaaccactaagtttttgggtggtttttaaaataacatagcaatagctaactgctactgtaagcaaagtacaacaaagcattaatccattgtgctgtgattttaaaaaagatttctggttgattttgcatttccaagggtacaatgaacaaagttttaaaagtagcatagctaatagtattgctaatcatttttgtgcacagtagaatataattcagacaaaacatttttcagtaatttaatttttagaaggaattttgtacctgagattcatagcttgggcacatttcaaaaatccttcaatttcaactactgaaaattgttggcagtctataagcatcatttcaacaagttttgtttagattcttaaactccatagactcaacacaataaggaattgccttaaaggattcctgtaaagtctgtttttttgaagcttgcttaatgagaatcaaatgagctttggttaccttacttgtctctaacactttcttgtctttatagtcattacgttctttgttactatatttggatgaaacatgatttatcatggctgttgcaagtgattttggatttttttcctcatgaacttctgaggcagaaaagttgacatttagcttttattttgtcttcataactatgaaggattttcaaataagactttttcttaaaacactcatggccttata

SEQ ID NO: 138897 - DNA, 1267 bp, Homo sapiens
gacagatgttctttatgtgccaggacctctgagtccctgggcccagggcatgcaaccccctctgccagtgccacatccattcccacacccaccaccattcccaatgaaattcccatccttgccacctctaccacctgctgtagtcacgggggcagaagcagcagcagtcccacttcagatgcctcctactgagatccacccaccttgcccgtggcctgcagtgggcttccaggaggagatggcccctctgtggtaccagagaagctacatccaggaggaagattccaaaatccttcaggggtcattccccttaggagacagcagaagccacagccagggagaaggttcagagaggtcccaaagaatgcccctccccggggacagtgggtgccacaacccgctgtcagagagtccccaggggacagccccactggggagcagcggatgccactcccaggaagaaggtacagaaggaccccaggggatggatcccctggggaacagagagagacaaaatcagaaagaaggtccaaagagggcccggaggatgcacaccctggtgtttcgcaggagccacaaatcagaaggtccagaggggccccaggggacggtcccccagggagacagcagaagctacagccaggaaggatgttcagatagggcccaggagatggccaccctggtgtttatcaggaggtgcaaaccagaaggtccaaagaggccccagtggactgtccccctgggggacagcagaagtcatatcaaggaagaaggcccagaggggccccagaggattgtcctccagggagacaacaggagctatagccaggaaggaagcccagagagggcccaggggatggccaccctggtgtttagcaggagctgcaaaccagaagaaggtccagagaggccccaggacactcccctgggggacagcagaagtcatatcaaggaagaaggcccagaggggccccagaggattgtcctccagggagacaacaggagctatagccaggaaggaagcccagagagggcccaggggatggccaccctggtgtttagcaggagctgcaaaccagaagaaggtccagagaggccccaggacactcccctgggggacagcagaagtcatatcaaggaagaaggcccagaggggccccagaggattgtcctccagggagacaacagaagctatagccaggaaggaagccgagagagggcccaggggatggccaccctggtgtttagcaggagctgcaaaccagaa

SEQ ID NO: 138898 - DNA, 1027 bp, Homo sapiens
ggctaaacaggactgggaccaaaattctctaaagctttcttaatgatccatgaacaattttggattggagctttagagatttaaaccttatgaatacttaataatgtataatttgctcttttataaaaccagcctaaatttcaaatacctccttgacacccccagaagcaaaaataaatacaactatacctcagcactccaagaacctgtttctgtctgggacactcggtatgtataaatgtaaccgtgatacctgtgaaagaataaacttccattactgaaagattccaaaagaacaatggatactttaaatttgagcttaatattacatataaatgtcacatatactaggacacacgtatatggtgtcattgcattcataggaagtaaagcatagtgaatctaacttgtctccatattgtatctgcccaaccacagtttccagtgagatttctttatcttttcattttttgaaatatggaaattcatgctcctaaagatttgtcaagttgagagaccatttggacagaaagaaactacaacagggacctgttgtaattgataaaaccatgaattattagatagttttaacaaacaatagacttatttttaagtacatatcgaaacttaaggtgaaaacatttcactgggataatacactatcaggcccacataaataattattaatattaataatatttgttataaatataatggcaatagtataaggatataatactataaattgaatataactatatttttataaaattactattataatgtatagcaatataatattgccacagtcatgcatcacttaccaagggggatacattatgagaagtgcatcattaggtgatttcgttgttgtgcaaacatcatagactgtacttacacaaacctatatggtataccacctaggctatgtggtatagcctattactccaggctacaaacctgtacagcatgttactgtacagaatactgtatgcaattgtaacataatggtatttgtgtatctaaa

SEQ ID NO: 138899 - DNA, 1042 bp, Homo sapiens
gacatggttcagaagaagtgtttgaaccctagcaatagacaaattgtaacaaaaaggcaggtaagaatttagttctcctctaaattacattaccatttctttttctccgctgttttttacctctctgcccaatgctatgaccagtattcagtgacttcctgttactgttaatagacttctactttacttggttaattgtagtcttatcaaaataattgtgaaaaattcaaaggtacattttggaactattcatagtgagccctgcggggcgggggggaaagcataatcttcaaggtgaactttagtgtgctttaagcacattcctctccagtggggaggatttcaaaacttttgtcgtttctgtaggcaatgaggtggatatattagaagcgtgaaagacaggttgaaagtgatcagttaggaaaatgttgcaataatctagagaaagagatgattaggagcttaacttaggcattaaatatccaaattttctaaaagggagacatacataggagataaatttaaattggcaagacttaggggctaactggttgtaagcaatgaaagagagaaaataataaagatttctgaaaaaaactggtttggctgtgtccccacccaaatctcatcttgaattgtagctcccataatttctacatgtcatgagagggacccagtgagagaaaattgaatcatgggggcagtttctcccgtactattctcatggcagtgaataagtctcaagagatctgttggttttataagaggaaaaccctttcacttggctctcattctcttttgcctgctgccatgtaagacatgccttttgccttccaccatgattgtgaggcctccccagccacgtggaactgtgagtccactaaacctctttttccttataaattacccagtcttgggtatgtctttatcagcagcttgaaaatgaactaatacaatttctatctttggcaagtcattaaagaggaggatggtgctagcaatcaacaaaggaaggtagggaagcaagaaggcagagttttag

SEQ ID NO: 138900 - DNA, 1044 bp, Homo sapiens
gactgacttggctacaactgggtcgggtacaccctgtggctaaagggtgaggtcatgtgatataaaacttggcagcaagagcagcagaggttgcaagcaggcagtggactaacaggcagtaattgacatcttcatatagtctgtttcttgcccattagtacactaacctttctcctatatacaatactaaagatgtctctgcctaaaaccacctacctattacacctcaaccacaaacacgtgcttccaggagagacacaactcagtttcatctagaagccatatgaaaggatcatattaaaagctgcctgtcagtctctgtctgcaacctttaggggacatccttaaatttttcagttcctgggcctgcttatggtctttggttcagagtatatattgcatccttgcagctgcttgggaatgatgaattatatactgaaaccagtaagcataaactattgcagaggagttctttcatcagcaaatctgaccaactggggaatctgcctctgggaggattatccctgagatgatctaagggcagcaacagtccacttctaggtaatgttggtactctgggaaaagccaacttgaggggttggttctcaaactcgaacttggattggaatcacttggaagacttgttaaaactcaaactggtctatggccataccaccctgaacgtgcccaatcttgcctgatcttggaagctaagcagggttgggcctggttagtacttggatggaagaccccctgggaatacgggtgctgtaggcattatttaaatttaatttaaaaaaaatccagaatgctgagctccatctccagagcttctgattcagtaggtacttgcatttctaacaagttcccaggtgacgctgatgcttttggtccaggaatcacactttgaaaactgctgtttctagggtgccaatttgaatccaggcgtttggtggttgagctgaagtgggctttgttgtatcgctgtatggtagtttcagtccaggagaatttcactaggtcatctgacagttgtgatcctta

SEQ ID NO: 138901 - DNA, 1052 bp, Homo sapiens
gtatctgatttggcccagccatataaatggattttattgtatttattgttccatatatcacagaaatagtaaaagataagtaagtttacttcatgtactgaaaagaagtatatataatacattttcctccctcataggctccacggcctccaaaacagccaaatgttcaggattttcaatttttcccaccacgcttatttgagctcctggaaaaggaaattctttattatcggaagacaataggctataaggtattttttccattttttaagattaatataatataatctttaaaaataatttaatctgttaatctagactagaaggtgttgcattttaatttgagagaatgtgacagcaaatcacaacagtgatgtttttaaaaccaaagaggaagtttaactagatgtaaaacatctaaccactgaatcaccagtacagtcatcactaaatgagattaatgaagaattatgcaatattttgaaatagtaataacattatttttataatgccagtgtttgaatagttaaagaatatgtagagagaacaataggtatgcggttaaaagcgaatgttaatatatgataggaaatttttgatcatttccttaataggtccaagaaatagtatttctgtctttattgcctatacgttgctgaaagccttgctggtggttagtagattgtagtcacttaggtgttaaagataatgataaacatgatagtgaattatacaattttaaaatgatcttttggtatttggaattcttatttatataggtagatagaatcctagttttcatgagtgaaatttaatatttgtcacactaaatctgtcatattgggagagtaagcataccaggtaatttctgtatgttgaaattgacttcctagtgaatggagagagatgaccaaaggtataataatcactaacattaaaaaattataaaatactggccgggtgcagtggctcatgcctgtaatcccagcactttgggaggccgaggcagaaggatcagttgaggtcaggagtatgagaccagccttgccaac

SEQ ID NO: 138902 - DNA, 1072 bp, Homo sapiens
cctcattcccatttgtaaaccattttctctgttggttgatcttctaaactaatcattcataagctaatggaaatgaagttgagatttctgatattttacctcctagatatatttcagctctcactcaaaacgttttcattattattgtttttaaataatgtaaatgaattattacttgcttagttaaatttgtgtatgtaattgttctaaatttgtatctatcgatgtaagcttttaaagattaggaacttcatttatataatatactttctacagaaattcacacagtacagtatatgtatagatgcttacatatttttgaagatggaagaatattataaagtatatttataaggaatattataaagtgtgtgaagattttctatatgtattttaaatgtttttatttgtttcttaaggaccctgatggtctaattttatttttctctttttcttctatccctttatcaataaaaaataaaggaagcaatagaggcttttaatgctcctaatagtagcaaattcatctttatgctaagtaccagggctggaggtctcggaattaacctggcaagtgctgatgtggttatactatatgattcagactggaacccacaggttgatctacaagctatggttagtaatctttaatggtgtcagaaatttatcatagctctgaatactattgctatttacacacataaaggtcatttatgataaaaaggtaacaatttttgagagattttatagaagttacagtagattatcctggaaaacacagttgctatgctaattgcaaaaacaaaagaaatgaaagcgaacaacaaacacaccccagatccaacttatagcatttatgtgttgattttggtttttttcatgaaatagaaatgtcagttttttcccattcctacagattgaagaggacacataaatttgttttaatgaaaaggattaaaaaacaatctcttgttattattctgttcaacaactaaatatattaaaatccttagtactgaaattaagagaggtaggattttaactttcataaaaaacaatttgggagagaagg

SEQ ID NO: 138903 - DNA, 1010 bp, Homo sapiens
ctgacctcaagtggtctgcccacctcagcctcccaaagtgctgggattacaggtgtgagccaccgtacctggccccattatgactgttaattgataataaaaagtagcaagtttggccataagttgctttgcacactttatcttgcttttgtttgttttattgtttggtaaaattaacattcttattagcattatgtctttgattttatattctacttttcaaactagatataatattgctacagtatggggaagcctaataaatgtcttttaaggaaaaagttgatggaattcttacacagtggggctcaaattttgttaactgctccagtattttacctattttcagaagtaaataatagtagctatcacagctgataatatttttgaaagtactttttaaatgcattatttccgtattggttgtataagaatctacagaatatcgggtatatttaaaaaaactgtgcactcattggagaatttccacccctctacaggactttgattcttggtttgacactaaaaattgtcttggtgatcaaaaactcgtggaaagacttcatgcagtaagtaatagcagacaagaacattcagtaattaaatagtatacacaaactgacccagaaaacaaaatgctatggaatctgtttgaacttgtgtttgcctcttggctcaatgtcactgtttctccctcctaacctttctgacagcctctttgttttttttttttttttttttttttttttttttattcctctatgtcctcagcctctctctagaacagcttttttcctttggctctcccctgtgaataatgtggtcctctccaatagagaggctgttcctgctcccacaccccacagttcctcaggatggtatcggtattctcctagttcacccactgccacttctaagctactgcttctccactgtcatgtataaagctcttcctttgaagcctaagctgtcttgcagttttatcctccacccattctgtttcctgttaa

SEQ ID NO: 138904 - DNA, 1156 bp, Homo sapiens
tatgatctgcattcttcttcctttttttttttttttttttttttttgagacggagtttcactccgttgcccagggtggagtgcagtggtgtgatctcagctcactgcaacttccgcctcctggattgaaatgattctcctgcctcagcctcctgagtagctggaattaaaggcgtgcaccaccacgcccagctaatttttttttgtatttttagtagagatggggtttcaccatgttggcaagtctgtctcaaaccccagacctgaggtgatccacctgccttggccacccaaagtgctgggattacaggcatgagccactgcgcctggcttgcattcttttaagtatagaaatgtttagttttgcctcactgcagcattgtcacctgaactagggtatttttccatagaaaattttcaagttatattgtagtcaaaaatatattggttggataaattacagtataactgaatgttgagcattctaataagtaaaataatcctcatatgagtattattttctagctttcagagattgttcgtgagttcaagtcgactaaccgcttgctcctaactggaacacctttgcagaataacctgcatgaactgtgggccttactcaactttttattgcctgatgtctttaattctgcagatgtaagtttaagccatacgttttaagtataactttcttattttcactgacatgtgttttaaaacattatagattgaaatttatggtactttttaatttgtaattttttatctgcatgttttggttttcttaggaaagagttctttaatagagttttaaaatgaggatctttggagaaatagtatgcttcttgtctttgagatcaacttgcctgttcaattttgtctctatcacattactcctaaaacttatgatgtgaggctgagtccatagtagtgcattcaccattttattttcattaagttgaaggggtttgaaacatatttttatatactagtttggcaggtggaagctataaaatgatctttgattattgtaggcattgacatttggtgagtgctaaagagctcagagtatgtgatttgaaagacagcatattgtgtaaatgtgttatttatatatatatatttttatcattaacacaaatttatgctaggacacc

SEQ ID NO: 138905 - DNA, 1097 bp, Homo sapiens
tctcttattgctgttcatttggattgcccgatgtgtagtgtaaataatgccactataagactcttgtaatttagtttttgtgcacctctcagattatttccgtaggattcctagaagtagaattactgggttaaggagtataaacattttaaggttttgatgtatagtattcataaaagttgtctcattaagtgacatatcagataggatacaataaaaaaatagctttaagcagacatttataaaaagaagtatatatcttgctcagagataaaaccgaaagcagttttaagaggccgaaaaaggacttagttccctttcttatgggttaggtatgggttcatagatattgaatatattattttttaaaaagtcctctggagttggtgatctctctcaggttctttctggctgcaaagttctgttttgtggttcctaaggttcttaagagtgtgagatgcaagtacagagccacaagccccttgagacacatagtctgaatatttaatatctgggctgtaataatgttaggaacaataggaaagaaagaccagtatctaagcaggctggcaaaggaagcgggtctttataaaacaaacacacagaaaattcctaacttcagaacaagaagaaaaattatatagtagattgcttgctcctttaggaggaaaatgttctaaatagaaagttgctttgttgagcaacattctgactgcaagttattggtttctgtttgtgctcacggtaagtacaatactgaattggaatgatttggttatcttctttaaaaaaaggtatttggtatttttacttttcattggtagaaacataattgcctttgcgagatagtggacaaagatcttttgttatgttgttcctaacaaaatgtttccttacagaaaaaatgttcatggatttttttccttgtgatgataatgcagggccttgggaaaactttacaaacaattgctttgcttggttacctgaaacactaccgaaatattcctggacctcacatggttttagttccaaagtctactttacacaactggatgaatgaatttaaacgatgggtcccatctctccgtgtcatttgt

SEQ ID NO: 138906 - DNA, 1043 bp, Homo sapiens
tttttcttatgtttaaggtcacattctgttgatttttgacctaagttttcataaataggttgacaaaagccatgatagttttcacgaacaaatttgtgttttctcttatgcaaagtatgtgttaaaactgaaatgctctcatctttggttctggtgggtagatttgtgtttttattattttatttcttggtttcttatagggaaggaggcttattctatatatgtatttatatttgccagtacaggcttgtctttacaaaggatagggtgcatgagataacccccttccccagataatctctatattaagttattgattgatgttagttttcgctaaattacaatttaaaaatatcaaacattaatagttaagtagccttgacaaattgcttctacaagatgtttatgcaatataaatagtttaaagtagttttcttcccagttagagaaaattaacataagccaaaagtttaaaactgtactattatattaagtatatgtgatcacattgcattacataaaaaattaaatattcttataatactatgaaaacaattttaaaaatatcgttttaggaacagaaaccacagtttttttttctgaaagtgtggcgtatttccatgacataaaggagtgtttcttagaattaatatttactttctttgaattatttggtttgtggttgatattagccttttctagattttaaaatctcttatttaatgtttacacattttcttacactataaattaaagaatggatgagaaagctcagtgtcttgccttttgggttttattccaattaatatttctttggcattcacaatttttcagattttttttattggacctcaggtgtacagaactggattaatcataagccttgttttgtgacatgctctcatcattggtccatacatgtcccacattgatttatatatttagttatgtaattactttccgccttcttctaatgagagcattgaccagtttaagaaccttgctttgcaatttggtgacatttattttctttgaaattctag

SEQ ID NO: 138907 - DNA, 1042 bp, Homo sapiens
cattaatacttttatttcccttagttctatctaagtaattacttatcctatcccaggttatcctcttcaaagttaacacatttgaaaatgcaaaaagcaaaagcaacaagcacccccaaaagacaacaaaatagaaatcaaacccttcaaaacaatgacattttaatgtcagaagttggacagtttcattgaaaaattcaccgctgcttatagcttaattaagctagttaatttattcagccagtatttgttgagcatctattaggctgcagacaaaactgaatatgatctggtctttgctttcaaggagctgaaatcagtgaggggaaataaatataaccataatggagtgtgtaagtgttctattagaggggcaaacaaaggcgataaggctgctggttctgcttgggggtactgaggacagtttcatggaggaggtgatatttgagatgaaactcggaaagaaacagagtgttcctgacaaaaaactaaaaacaatacttgaagagtgcttgactttgagaatgctagttgacgttcagaatggctgtttaccagtaggtcgtaccttgattctggaccactaaggataaataataaatgaaaaattaatatttcaggagtacgtatggatttagaagtatggatttcatctggggagtcaggtttactcatgtttatgtagaaataccagcgtaaacttggaaaccagagaagaaacaagggatttgaaggcaatccagttgtgatatctgccaccttgttggtcactgatattttgaccaatccagctggctgagcaccccctcttactcctccatgaacctgaatgcttgtttgaagagacagatccattctttggtaaaaagccatgggaatataattggaaggttaatttatgaattttctaattcattgattccacacacacgagcaactcctgtgtgccaggctttgtgctaggtactagaaattccgtggtgtaaagatagctgtggtccctgcactcatggacttcacatctagctgtcagttcttcact

SEQ ID NO: 138908 - DNA, 1044 bp, Homo sapiens
tttattttagttgatttgctcatagtctttagaacccagtgctataaaaaatccctttaaaaaatattaaacgaaaagggatttaaaaaaatatgttctaagacctaggagtagtgactgagagaagcagttatttagttaggcatgtattcttttggttgtagtgagtggttttctcttccctaatcctactctcttttttttcccctctcagaagcagaagaaactcttttgattgacatagcttctaacagtgagtatctttctgaatgtgcttgatttttactcaacaaatatttacttgaacactcactacatttaagacaccttttggggcacattttttattttaccatcttttcctgtagtctcctgtagcagccatacaaattagcactgtttcccaaaaacatgtaggctaagcctaagaaaaagcaggtggctggtaagaatctttataaaaataaaaaataatgatctacctttctaatgctgaacttccgtgagctaccagtattgttgctgtcagttgaatcattgctgtagaattgataattgtaggaagggctgatgtttaaagcacataaggtttattggtggagtttttttggtcattttttaactgctattacattttaagttttttccctaccctctttttaaattttgtgtgttaagtcataatattttcctttatttgttgtatttttttggaaggctgaagagtcccttaaattgcttgtccaggcattcctttaaaaaaaaaagtttagtcttttatttaagccccatcccctcaaggcatctctttattagagggaacatgatcttcttttcaatgtttccattctctcatttttatctgtttgaagcaaatcatctttgactttctgtgcaaactgttctttgtttatcatctaattgtactattttatggagtggagaaaatgggcactcgatgctactgtgaggttgctatggaaaagagtatctgaccacatgaatctaaatcaaatgggttgccttatctcttggttgagtcct

SEQ ID NO: 138909 - DNA, 1109 bp, Homo sapiens
ctggatcaccacatccaaacagttgatatagatgataactatagggcatcaaaaaaggggagacaatatgttatacacataataaattaaagccctagctaactttgcttctaattctcctagtttccaattggctgtacttgaaccaaaccacttctgagcataggtcattatattgtttttgtatgtttattcaagacatacattttaaacttgaggtaatgagttgtagatgcttcttttcagaatacttcaaaccagtatcactatttttaagttattttgtaaatttaatctgtgcttacggacaaaccatcctacttattttattcccttcatgcttcagatactctgacaatgtgatctggacttgaaatggtaggaatttccagctaaggaatgggagggagggtgattgaggaatttaccttttgctggaatttgaaggtccctgctttgatgtctgagagatagatcagaacgcaggaaagtataattttagtatgtgtcatatccttagatcgggctgctcatggacacggttcatcagccttaggagttctcacttcccttagggttccctctctgcatcaccccttccaccaccgtcatactgactctcttgatcttgtatgtgtgcttcctatattagagatctggaatatttgtgatctggaccttcttctgttaacctgataagttgagaatatgatcccagtaaaacattttatcccatagcagtatatgtatggatttcaattctttttaggtggctgcaaaattcgggttcagggggactggatcagagagcgccgctttgaaatccctgatgaggaacactgtttgaagttcctctcagctgtccttgctgctcagaaaggtaactaaagactcagcgattttctttcttctatttcaacgggagtggaattctgacatgctgatacagaggaaagtggccattggcaaaatacctcaccctttaagccctgatagctgatttttttttcttcaggagtgaacacagggataggttagggaaaaaatctgcccagctttaaggacactaggcaagttttcagaatattcagtgtcatggcaagcacagc

SEQ ID NO: 138910 - DNA, 1017 bp, Homo sapiens
aaaaatggtgctggcccctgcatataaggaatgttgaaagaatggcttttggctatagtaaattctactcagtgaaagacttcccagtttctgaccatgaaccttatctctctagctcagtcacagcttcttgttccagagcaaaaggactcatctagctggtaccagaaattagacactaaggacaaaccttctgttttttcaggtactaaaaagttcctggtttccttgttgctatggtcattgcagagtcagtagattttgtcaggccaaatatggtgatgtagattaaagctgatgtcagacacattctcctgcagagtagttttatcaagtccaggcccactgaccagtgttcactccttatccttcctgtagcatggtagctgttcaggagccagcttagcagggtggtagaaagtacaagctcgagagccagacagcctggatttgaatcccaagtcaagaacttactagttgtacaaccttcatcaagttactcaacaactctgaacttcccttttcctttctgtaatatgggaagatttttaatagtacttacttcttggagtttttgtgatgattaagtgagatcatgatatagtcccttactctcaaccaggcattgtgctcagtcttcaataaatgttagctattactagtctgttccaagttcttataaacttctattgttctagttagtatatcagtgcttcagggataggtatgcttcttcgaactccaatccaagtaatttctacccttatgatagttttctgtttagtaataccactgatcaaattgtgatcaaatcaaagccctgttaccctggatatgttggatgttagattttttccccgtttgactttggggtctgtgtctttcagggcttcttggatttgaagacaatttttcttctatgaatttggacaagaaaataaattcacaaaatcagcctactgggattcatcgggaacccccacctccacccttttcagtgaataaaatgtaagtccc

SEQ ID NO: 138911 - DNA, 2838 bp, Homo sapiens
cctggagtcaactatagccccttatagaacatttatccatatttgactagcttacagcatgaagatacctctttcccatccataagctctcctatcaagtatgagtttggatggagcttaattgaaaggaaatgtggtatagcaattacctttgcattttttaaaaataaagacttggtttccttctgtagttttacttaatgtaaaatttagagaaaataagcccactgcctttgtgttctagatgcaaaagatctttcttacatatgtggcaaaacattttgaggaattatgttagcatattgtgaacatacctttgtatggaagcgaaaagaaagaacttctgttggtttatacttgatctttgttttcaaattatcttttcgtattatgtattagattttttgttggaacttggaatgtgaatggccagtctccagatagcgggttagaaccttggctgaactgtgatcccaatcctcctgatatctactgcattgggtaaagaacacttctggaatttccttttggctatatgtttggtgttcatttacatgatgttttgccttttttaaaaaagactgttggtaaaacctactgtagactatacacgagagttaacttgcgggtcaaatttgtgagaacagaaatgaacagatacctaaaatggtgtaaggaagcatctaattttcttgaaacccgtaggaatctatatattctgcatagaaactaagacttggggtcagttctaacagtgacagttcctaggatataagagcaaagctctgctgttatcctctgtgggaggtattttgatttattttttgcatagcttatgaatgtacttgtgggaattctttagaaaagaaagctacttgttcttactgataacctgggtgaacagagcagttctataaaatttatctctctcccatctttttttcatctaatgtttcaacatatgggacaggaggtagccagagataattatgggatatgtatagatctcatatcccttttttcctcagattccaagaactggacttgagcacagaagccttcttctactttgaatctgtgaaggaacaagaatggtccatggctgtagagagaggtttgcattccaaagccaagtataagaaagtaagccgcatttaattatctttttaagtgtatgactaaatagggctcaccgggagttattccattatctacaacttgttccaaaagaatagtttaattgaattcttctctgtgtgtaatactgggatagggcagattgatcattcatccttatttcctagaaaaaaaaatccctaagctttctgatactatattttcattgcttagatagcttttaggggaaaaaagaattttattatgcttatatcaatacttagtttgaaataattacatataagatttagattactcactgacatggtcagaattgaatgctttacagaaaagcaatatgaaacgtgggcgcatggtgcatgtgttgcaatcagagcaagaatagaagtggtgtggaatttgaacgagttctaaacttggttttaagttaagaggagagttgactttagcaagatgggccaatttgtttgtctttagaaggtatgtggtaaaggcatttagctaccagaagagttaattacagggctatcatactaaggtctctaaaagaagtaatgtgagtaatttttctctacatcttctaacagtttatataggtaataaaactcctggggatgttattcctctcatataggtccctgactaatgtatatctcagacatatttctagctgtagttcacaagttaaaaataagtaaaaaagattgctgtttggttgatttcaatttcttagaaaattagacatcagaaactaggaaggaaaggtggaaggaacaagctgggatagtggctttattatttgaacttttaatgctgcttactcctggtaggctaagaagtgattaaaagaatagatctagagctgaaagtactcattgtccctcccagcttttaactcttattggtcagtgccagattagagcctccccagagaatattagtttccacttgacggggtccactgagaaattagaggatatgaagtcagatttgggcactagtatatcatcttgatggaaaattagtcgtgggacattagaaatgtggcaaagattggtattaacattaaccttttgtaactccccggaactcataggttcaactggtgcgccttgttgggatgatgcttcttatatttgccagaaaggatcagtgtcgatacattcgtgatattgctacagaaacagttggaactggaatcatggggaaaatggtgagttactttggaaatgagcttgattattattcatgttcatgtaaagttcagttgcttgttctgtgtactaattgaataattactcttgctaacagggaaacaaaggtggggtagctgtgagatttgtatttcacaacaccaccttttgcattgtcaattcccatctggctgcacacgtggaggactttgagagaaggaatcaagattataaggacatttgtgcgagaatgagttttgtggtcccaaatcagaccctcccgcagttgaacatcatgaaacatgagtaagtggttaactcacctgtagcctttgagtagtggctacaggagtttggatagtgtagagattaaatgtgagatactgtagagctgtgaagagtgaaagattaccagtgagggattggggtcacaaaggagagggtttttgagtaataacagaatcattgaggcagagaaattagacttgatatcagaggaaaagatagt

SEQ ID NO: 138912 - DNA, 1001 bp, Homo sapiens
cctttaaaattctgtgagtcttttaaagggctagcaatgatttattgagaactcgtattcatgaattataacaataccagtctgtaaactctggaactcctcaccccaactcagttgcaaatcagagtcagggacaaaccaggtctttctcctttatcctcatttctcattgccttcccctgcaaaggcattttagcacaatgccttgtactggaggatggctgctgcttaaagaaaacttttttgagagcctggttcgacaggttagtatacaaaatctctgtctagttttattcatatcatgtattagatattcatgggaggaaaaatataaaatgtgtcagatagattcttcatttgataacaagtcctaaattttacaagaggttctagtctaaaattgtatcagatgttgggcactcaaaatcaacttgacattaaaaggtatcgtaattatagtactataaatatgtaccttataaagactattctaattgctttatttcatgtgatatttaagagtctagataaacccacaaaagcatgtttaattcgtgaagtatctaccaatattaaaacgcctaatccccatggataacagtagtgtgggaggaatgcattcagtattaccactaggaatgccagggagcacatacttttcctcctccctctccactcccagctcctgtgcatctcagacagtaagattgggatttctccttttacctagcagaactaagacatgtaatttagacttgagtgcttagtggtccatagtcagattcgaaacaatccaggttgggagtcactggggaggtatgaggaactttgaggaacccagaccttctgctggcatactgccccatcacccattggttttaggctgcttcaaggtaaatattactatccctattttagagatgaagaaactgaggctctatgaagtttggtaacttgtgtgagggctatacaaaattgccaagaggtggaacgaagatttg

SEQ ID NO: 138913 - DNA, 3034 bp, Homo sapiens
tatcccctgcctctctttttttctcttatgcccaataggaaaataaaaatgggataatgatggatcttctgatccgcaaaggtctgaaatgaaattcatttatagttcagaaggaccttcaaatctgggcactctgggggcctttgaggaggggattgggtacgaggagatagaaaggaatctgggatgctgcttaggagactggctggggtgagaagaatgaaaatggaaagtagagtggtttaccatctccttccagatggccactgttgggcccacagccatattctttcattgaggtatatacctcaatgcacctgcctccaagcagcagacaggaagagacatcaggggcatttggctgggtcagttggcagatgccaaagggcactgaagtctagaactgcacatatttcttgagtgatattctcaaactgcacaaaaatttaaaatgtatagtaaactttgtgtatgaaaaatgtatttcattttcaacaatcataatttatttgaagaattcaaagctgtttaaagcatgtatatctggtaagatagtgagttctaatactgatctgtttctaattctgtaaattaattctaatcatattctgtctgtcaatgactttcttttcctgctccgctctcaggaagaagacagcttcctagaaaaggtaatgcaatccattggtggttatgagagtttccctgtgcttgattaacacttaactgtggtccctggaatttgtccctaggctttcccatatcagagacctctgacttggtgagactcccctaaagtcctgccggctgtccttaagtgtgtttgaagtacaggaaagatatttactgtagcagtcaagtcattgagactcagtacataaaaacagtaggactcaaggttctagatttgtatttttgaaatgagaagtaactacagagccgtcttgatgtatctgaatgctcatgaattggaggggggtaccagttagctgtcctccatttccaatgacaataaaacctgaagaagtagctttctgttgcattaaaaatgatttgaggttaatgatcatagcaattaatttcagaaaaaaatacacagatatgatcaagaaatagagcatagaatagaaccgtggacctgaacaagatcataaaagatcatctggttcaggcctctaccttcagacagggtattttctccattctaatagatgagacaaccaaggcccagaaaggttgaaaaacttgctgaagtcatgcactgtacccacttggtggaatttaatgccttttgatgatggggatggtatactgttttcatgctttagttattaacactaagtaaggttacagagtgtgggcttatcaggcgctgaatgtgtcttgttgaaagaagacaaagtaccttggttttcctttgaaaattagagttcaggataatttgtgaaattattcaagtattttctgtgtatgatctttctctagactttggagacacaactgtggcattccatattatcatacaggaatttgaaaatgaatagtggatggtgtatataatctactgacactttattaacctttttaaaccaccaaggtttgagacagctgtgcttcctagctcttccctgttaagagcagtccatgttctgtctttttatcttaggcagtgccttgtgttgccttaatgccttagtacaggaaaagctccagttggatgtcagactttttaaaaagtacatgaatcagtgctgcataatttctatatggcaagtttggaggcatctgctaaagaatcagtacacgtgctgcatttggtccagagagttagcagagtgcatgatggacagtgttttgtctcaaataccatgtggatgcttggatttgatatttgtaactggaaagaagtaaatggatgagccattgatagacattctggcaactattaggaacatgaatatcaagtgatagaatcccagggaaagaaaggaagcaaactgaatgtggggaaaaaaaagaaagattttaaatggtaaccaactgtcacactcccttctctttcttattcccttggaaaggcacagcagcttttaaaggtcatcagtgcttgttaaagaacacaatgttaagaagagacctcagctcggctgtagtgtatgtggtctctgtcaaagtagtgacatgctcctttttttttcttttaaagctacgtgactgggggttgtggatggaattcacaagttgcacaatgttaggcaagaatttcttagttaaacatacagaatatatatgacctcaagctagaggcgggggagggaggaggatgcaaaaaaattggtcatggttctctccactgggatttttatgaagggtgccttcaggtgcctttactatttcaaacattttttcatgtaatttatatttgattacatgaacctaagataactgagtttatttcctagccatttccaattcacatatagtgattgatttgatttatgtcacttctgggtttttctcttacaaaattctttcagaagaatataacagatagtagaaagatagatgaaaggagtaaaagcccctagaaatcttggctgagctattcctagaaactgtaacttctggactcagaccttaaacttttcgtggtatttctgcctcttggttagctgtattcagtttactatttttggaccttaaggcttacgagttttagcaccttaagattagaacttccatcaagcctgaagtatttacatatgtgggtctaatgttgtggagagttgtctttaattcctgaaaactaaagaagctaatttaaatcaacattgaaaacaaacaacagtatctgtggtaagacctgaaggaagagtaagttagaaataaacaaaaacctaagtgtagaccttgatctctcaaactactgtattgacaattgtaatttaatagtccccaagtcaccagtgctgtatggactccactgtgactgtatcaccggagcactggttctcagtgtcacctttgaaaggat

SEQ ID NO: 138914 - DNA, 1092 bp, Homo sapiens
tttctcatttcctttcaggaacttttgacctctttccatatccagctcttactaaaaggaagcaaggggtagataacaatgacttaaaagcatgggacatagaagccacagcactggtactattctccttcaggtgatcagtcactcctgccaccacacgtactgttgacagggcagggagaaggatgggaaacatgggcacctggtttataggactgctccagtgtcaactgtcactctgcaggctatattcccctgaccctgaagctgggccaaagctgccaagagtctttgaccaattctgtaacaactcacctgcagggcacttgaatcaataaaatatcaaacccccattaggatcaatgtgccctgaataagaggagggaaacagtccctgtaggagcttgaggaaaggagctcgtcggggctctgtgtggcctttctcctggagctcctttcccttgacttaagttgattcagctggcagcaaccactctgtggctgaagcactgctcattttcttggaagccctgccagagccagtcatctgttacgagctgtatcagcgatgtcttgactctgcttatgatccccggatctgccgacaggtgggttctactgacctggggatgtgtttgacgcagattgccccatagagaagtcgtcagttttacagagccagataggcagccagctgtctggtaggatgggtctgcatctgttattaatggcaggacaccaacattgagagttgctacccttaaattttaggttgtgttgtttcctacgatatttgccacctttttcccattggcctatttctgtttacagaaaacatagtggggtggatccctctactctggggtaaattggtgaagctgattgtacgtggaattctggctgacattaccaggaaggatgggtgacacttgggagcctttcttctttttctcttcttggtgtgtgtttttaatcctgaaatgattttaatgcacagtagctgacagtacctgtgaattggactagtgagtattgagaggagtccccatccatgctaagtgacattgtaaagaaaaccattcaaacaaaaaa

SEQ ID NO: 138915 - DNA, 1020 bp, Homo sapiens
cgaagaagactaaggcttttactgttctctgatattctagaagcagacgatctcgggctccaagtatttcagaatgatttaaaaagtcatgccacaggaagggtctattgcagaatttcaagttctgtttatagtaaaaaggaagagcgtttcctaatccctcctttaccatatcctacacagaaaaatacttttagacttatattgccaagccaaagttaccatattttggtgtttttgtgttttctctttataaggcaaaaagatctgtatttacactccttcacctagggatgtgtttgttgccctcctacccaattgtcatgattgtccttagtaccctaggcctagattctgagatcttcccattctaggcctacaagcactacttgctgtagctgagacttgtctagagtcctttgttttgcacttttgacccaccccttcctggatcactcctttgcactccactcccctcgttctgtcactttgaacgaagtctgagtgaggctagtgactccttgggtgtcctcaacagtgaattcactgtctgcgtgcagttattacatgcatttgtgcatttctactacaatggcatctttatgtctctgtaacattggccttttcatggctccacactgggtggaaccatattctcttagatcacatttagtagcataactgtagggactattagagatggcatctcatcgatgagagagaatcacaatcagaatggaagcactttgagtatctgaagagtgagagcattcatgtttgacaggtcctgcttcccactatccttttcctgttattattcaaattttacacaaggactaatcctgggtgtctctgagacccatctcctgcctagacatccacctccagagcaacactggccccacagtaaaagaggaagtcttgtacctcaggcaggcccatctagagctattgctccttcccacagcaaaggtattgtggatgacccttagaatccattctctggtcttctgaaatacc

SEQ ID NO: 138916 - DNA, 1558 bp, Homo sapiens
ctgactctgggctctacaaccagctccttcacataaagggtttagagactccccttggctcccagtcaccatatccagtgttgtgtaaagagactggccaacaggaccaaccaagcaccttacctctcccatacaagatgaccctctgagcttttcatttattcaagctctgtggtacagcctttttttaaaataaattaatctatattggttgacaaacaagccaccaaccactgactgcaaaactgcctgatgcagttgggttcctcctggttttcttttgttacaaccacccttgcctgtttacattaattgcaaggagcataacgtacaggctgtatgtacaatcctgggcattgactctgtgacatttctagcatatccaaggcaccaccagtgatttctcctgtttcttggtgggggtgggggggaaggtacgtattctgcaatatggctaaaccctttcctgattgagagttaaagcaataggagtcaagttactggtgccacagatctggaggtatgataggtcaggggctaggtgttgaacttagttaatggaagactgagagcagaacaggtttgtcatctccgcaaggccagaaagtgatcacaaaaagaggcagatgatagacactggggtagggtcataccacagggaaatacctttcctgggcttgttttctagcatatcactgacctgggatctttgggtgatcaagggtgtggttagtggaggctctgtgctgcacgtatgcagtatcctatctctttctacatcagatcaaaacactaagttggtgtactgcctcgaccttttttcagctcatcctggaacatatacagagttgagagttttagacaatctctaggtagaggagacaagatgtagacccagacagaagaaatctgcttccctaccatggctattccagcaccccaacctgtaattgccaagtcctctaaggtactaatttgtagctgctctgaagtaaggatttcggattcagctggtagggaaagactctgcacctgctgtcttagggaagaaatggttcaaatccatgtggtgacattgcattagtctccctttcactgttttcttattctgtaattgtttgttatatttcccaaaaacgtcttgatcactaagcaaagctgctagtgggattctatatttcgtgtcatcttttttattataatttattgcaaatttttttctgaataaatatatgttgtgtgaaaaagcaaagtgtgattttggtgaggaagcactcagaagggagggcttatgtgtcactgggttccattcgacttgactgcagtccccatcagctgtgcctgcactgtcatcacctgtcttacagggaaataccatttataagaattcttagtatattcaccctcagagatgagaagaaaccatgcgttttcagaggctaataaaggtgtcctgtactttcagaggccagccaagtacccttattttaaccctaaggattcaggcaacaaaacaactcaattagaggaaaggatgttgattcttaatgcatgtaaa

SEQ ID NO: 138917 - DNA, 1067 bp, Homo sapiens
ggggtttcaccatgttgcccaggctggtctcgaactcctgacctcaggtgatctgcccgcctcagcctcccaatgtgctgggattgtaggcatgagccacagtgcctggccctggttgtcatcttatctcttctttataaaaagttattgagacaggcatgggtatcttcaacagatgagaaaacaaaagctcaaggggagtaaactgaagcttgggtgtattaaacattgaacatctctttagcagggacgtctccttactagctccaggagggaccactgggatgaacgctgacccatggcctatctctggtgacattgggctgaggcaggtgaatgcattcaaagcattagagacgccttactgcctgctgcagccccatcccctcactaagtctgccctgtcagggatgactgtagggtaactccagtctccaaggccaggcatgtgttatttattcacaacatgacacagctgctggccacaacagacagaacatcttgtgggttgggttgggggtgggtggggcggtggttcctagttgccatggaaacttgagaaggtgtcaggaacaccacatcatgtaaacattccataattattcatttggactggggcggcagcagacagtcacttcgccaattactaaacgcttggccttgctgggccacgtccaaggctggtgggcctggtgggtgtggttcctcctttggctgtccaggaaccgcccaagcgtgtgggctgctgccagtggctttcctgggacttcactggggctcactgagcactgagctttctccagtcgcacccctccaccagggcatccttcccctgtcttagtctgtttgtgctgctataacaacatacctgagactaagtcacttataactggaaatctctttctcacagttctgcaggccgggaagtccaagatcaagctgctggcaggttcagttgtctgttgagggcagctctctgcatccaagatggcaccttgttgctgcatcctctggaagggaggaacacttgtgtcctcaggtggtggaaaggacagaagagcaaaagg

SEQ ID NO: 138918 - DNA, 1043 bp, Homo sapiens
tccccttggaccccctctcttccctccagatcccagccctcctgcttggggtcactggtctcattctggggctaaaagtttttgagactggctcaaatcctcccaagctgctgcacgtgctgagtccagaggcagtcacagagacctctggccaggggatcctaactgggttcttggggtcttcaggactgaagaggagggagagtggggtcagaagattctcctggccaccaagtgccagcattgcccacaaatccttttaggaatgggacaggtaccttccacttgttgtatttattagtgtagcttctcctttgtctcccatccactctgacacctaagccccactcttttcccattagatatatgtaagtagttgtagtagagataataattgacatttctcgtagactacccagaaacttttttaatacctgtgccattctcaataagaatttatgagatgccagcggcatagcccttcacactctctgtctcatctctcctcctttctcattagccccttttaatttgtttttccttttgactcctgctcccattaggagcaggaatggcagtaataaaagtctgcactttggtcatttcttttcctcagaggaagcctgagtgctcacttaaacactatcccctcagactccctgtgtgaggcctgcagaggccctgaatgcacaaatgggaaaccaaggcacagagaggctctcctctcctctcctctcccccgatgtaccctcaaaaaaaaaaaaatgctaaccagttcttccattaagcctcggctgagtgagggaaagcccagcactgctgccctctcgggtaactcaccctaaggcctcggcccacctctggctatggtaaccacactgggggcttcctccaagccccgctcttccagcacttccaccggcagagtcccagagccacttcaccctgggggtgggctgtggcccccagtcagctctgctcaggacctgctctatttcagggaagaagatttatgtattatatgtggctatatttcctagagc

SEQ ID NO: 138919 - DNA, 1050 bp, Homo sapiens
tcattgtggttttgatttgcatttccctgatgactaatgatgtcgaatatcttttcatgtgcttattggccatttttatgtgctcattggagaagtgtctgttcagagcttttgtctattttttaattggattgtttgtcttttttattgttgagttgtaagagttctttatgtaatctgtatgcaagtctcttaccagatatacaatttgcaaatattttctcctattccatgggttatcttttaattttcttgatagtgtcctttggagcacaaaatttttaaattttgatgtagtccagtttgtctatttttttcttttgttgtttgtactttttggtgtcatatctgagaaactgttgcctaatccaaagtcatgaagatttatgcccttgttttcttgtaagagctgtacagttttggctcttacatttaggtttttgatccattttgagttaatttttatatatggtgtgaggtagagggtccacattctttcttttgcctgtagctatccagttgtctctgcaccatttgttgaaaggactattcttctcccatagacttgtcttggcacccttgttgaaaatctataaatgtgagagttcatttctggactttcagttctattgtattgctcaatatgtctgttcttatgctagtaccacgctgtcttgattactttagcattgtagtaagttttgaaatcaggaaatgtgagtcctccaactttatacttctttttcatgattgttttggctcttctgggtgccttaaatttccgtatgaatcttaggatcaacttgtcatttatgaaaagaagccagctggaattttgatggggatttcattgaatctatagatcaatttggggaaatattgccatcctaacaagattaaatattctgagccatttacatggactgtattttcacatatttaggtatgatttgatttctttcaacaacattttgtagttttcagagtataagttttacacttttgttacatttattcataaatatttgattatttttcatgttattgtaa

SEQ ID NO: 138920 - DNA, 1034 bp, Homo sapiens
tcattttaacattatttttaatgtcagccttggtttttatcttgcagatcaaaggatcatggacagggaagaatcgcgtccagaatccctacagccatggcaatattgtgaagaactgctgtgaagtgctgtgtggccccttgccccccaggtgctcagggcactcaaaagtcctgggactgttgggatgagcagctcaacctgatcctgttaccttgtctgatgtgtttttctgagtgtggcctcttggtgtcaaataggtctttccagggcttgccacttggtaccatgtctacatggaccatagaccatgggctggttgttttggagggatgatctttcattcttaatttcatttgtttgttccctggttaatgtgacatttcctggtttgtggaagaaaaagtgaatgggagataagaggcatgtgctgtgttcaggctagattgccaaaggacaggtttatattttccagtctatgcagcaaaattccgtaggccaggtgggtggaggggtgaatgcccagttctttgttaactctcttatctccttcagtgtgctggatcgaaggggtattttgccactggaggaaagtggaagtcgacctcccagtactcaagagaccagtagcagcctcttgccacagagcccagtaagtgttcctgacttaaggctgggtcgatatagagagggcggaggctaatttacagcttggaaatataattaggcaatattgtattctaatcaccccagcttccctgcctctacacctgccctgatgttgccttcagatctttgtgtccttgatgtagattaagatttagtcatttctttggtgtatattgagtgactctgtgccagccactgtactagctgccagggttataccaatgaatgaggcaaacgatgtccctgctctcaaggagctcattgtctagtgggggcaagaaacaagtaaacaggccattgctcaacattgtgaaaagtgccttgatgaggaaagcataaaatgctataggggcaaagacagaggt

SEQ ID NO: 138921 - DNA, 1279 bp, Homo sapiens
ctcccgagtagcttggactacagatgcccgccaccacgcccagctaattttttgtatttttaatagagacgggggtttcaccatgttggccaggctgttctcgaactcctgaccttgtgatccgcccaccttggcctcccaaagtgccgggattacatgaattttgttttttgacagaatttccattggcagtgatggccaacattgtttagctttggcccctcccatgcatccccttccaagagccaatgatgggtaaataggcacacccttaaataccctagatacgctagaaattctttcataagggatctatccagtaagttcagaattcatctattgttatatatggaaacatggctttttgtgatatacgttccaggaggtaaagatggtctgactggtgctctgaatatgggcggaggcatcaagtctcctgatgttgagttcttcaatactccttaaccacacctcactgttctagaagtcctcatttgcttctttacactctggtccgtcgtgggactgactggatttcatactttcctcgtggctctcaaccagacaaccaatgaagacgtgagtcaactttctcttctcctcaccacatattcttcttcccaaagcctatcctcttgctacctgctagagaactaccgagtctccagggcctgggaggttgaggcaggcagaaacgtggtatgcgaggttgttaagtcagatgtgtggaagagaaaggagagggctttgttgaatgcttgtggagcattaggaagaagaggttgaaaagttgggtgggtatacagcctttaactgttcacaggtccttaaaggctagctggtgcctctgtttggcatggagagggacagttgcactggatgaatccttgctatataaaaagttaccaattaggctgggtgtggtggctcacgcctgtaatcccagcactttgggaggctgaggcgggcggatcacctgaagtcaagagttcaagaccagcctggccaacatggcaaaaccctgtctctactaaaaatacaaaaatatagccggatgtgttagtgtgcacctgtagtcccagctactcgggaggctgaggcaggagaatcacttgaacccgggaggtggaggttgcagcgagcaaagatcacgccactgcactccagcctggacaacagaatgagactctgtctggaaaaaaaaaaaaaaagttagcaattaatctacattcactgtagaaaatcagaaaatacagatgagcaaaaagaaaaaagtaag

SEQ ID NO: 138922 - DNA, 1050 bp, Homo sapiens
tttccccacccttgctaacatggggtatttttattgtttgtaatgttttttaatatgataggtaaaaatggtatctttgtgctttaatttttatttctctgattattagtgaaattggatgttttcatttaatgtatttttagctatttttttaaatgaatgtttttctttgtaatcagaaaaaaaagcctcgaagaaacactttttcttatgtatacaacagaactgcatgcacttagtggagttttatgggcatattctgtgatgttgagtgtctagtctataaaagacagggggcttggggaacctttgaatgcccccattggttttggagaggtggtgagacttttgggctcaagtgatggctagctgtgatattaactgtctttattgatttacagaagctaccaatggtgcggtgccccagggccagcgaccaccgcctcgtatcaagaatttccagataaacaaccagattgtgaaactgaaatactgttacacatgcaagatcttccggcctccccgggcctcccattgcagcatctgtgacaactgtgtgggtgagtaaaactacagggacattgcctagggaaaaggctgagttgaactagaaagtcagggtggtcaccaattttgggaggagggaagatagatttagatgagaaatgaactagatttagatagggaaatttagataggcaacaagctcctgaaaaactgcaaatcagctgtacttgtgtagatcaaatcaaaatttaaatatcctctagcctaaactttacaaaaacctctttagtaaatgagaaaaataaactttacctatttttgaaatttagattttcctgtactggattttcatgtgggacccaccttacatagtgggaggagacacctagtccactggagggcagcattgaggaaggaaggtctgtctaagacgcaacccaagaagaggaaagttgctagcatttattgagtttctactacatattgggcactgtgctaagtgatttacctttctctcatttaagacttgtaacagccccatga

SEQ ID NO: 138923 - DNA, 1108 bp, Homo sapiens
acagatggcctcccctgcacacaaacctgagggcacccctcattgttacattactcagcaatcctcacctattttgttattctgggtcctgtttccttaaggctcagctctcagctagctggtacagtgaaaagccaactgagttgggaacctacagattagttccagcctcagctggaccacatactagttgtgtgcgtggcacatacgtgcttattagaagtgagttgctctttccctcaaaatcactcaacgtaaacagctctatattctgtgtatgtctggtaccagccttggagtgattttttttctgtggtgtaatacctcgtactcgagccactgtttgaagtctgtgtaggtctcgtctctaggggaggtggccggctggattctagggcactgtggcgtgtctcctgggtgtgctgagaatgctctacactctagggatgggagcattgctaattgttttgggattactgtgaggaggcctttgagagccaagaggtgtgtgtgtggactgtaagccacacctgaggtgagcgtgctatggtgtatgtacatgggtgacctggaaatggagggcttatgctggggtgtgtccatgggaggtaggagggggcaccttggccagcctagtggggaagtaaaatgagctctggtcccttggggctcatttttgtccttctgtgagggcttcaggctttcccagtgcacccagagtgatttttgggctgctttgccagacttttgggtggttgcagctggcttgagtaacagcagggggagggagatccagtttataacggggctgggaaagtaaggtcagaggaactctttgttaaaggtccttttgctgctgccgccgctactgctgactttgtgaagtgtttagtgaagtcaggcaggttgctgaaggcttcttatttgctttccagtttgagtttcctgaatgagtgtgtgtgtgtgcatatgtgcacgcacgtgcttgtgtgtggtaccagtgagcatgtgtagtcaggcaggcataagcccctagcattaaaaattgtttttccttctcctcacccttctctccaagtattccttgcctcattcctgtcctgcttct

SEQ ID NO: 138924 - DNA, 1678 bp, Homo sapiens
ttctcgtttccctgctccgctcctaggctgtttttggacctttgccctctccagcccgcgagttggctgtttctccctccgtccgtcgggctgcaggcttccgcctcagtcctgccagcgtggggcatgtggtgtcggtaaatagaggccacaacaccacacctgagcggaggagaagggtagcagaggctgagaaactctgggcctgggaattcaggatgctgagtagagatggtacttaggacatgtcccagaaagcgcccttgtgacttttcttagctgctgccattccccaccccccaaccagccatcagcagtcaccaaccattccagaatctctcctgcttaagtcagcctttcacctacaggtctctgatgtggtttcattaagattctcacaaatgttaggctagaccagccagattgtttcatttcccggactcaggaagttgcagagggtttgatgaggggaaatctgttttgtgtaaatacaatgcacgtatgtgcacagagcgtccagaacctcctggccctgccagagggtgacttgttccctgctgtgattcatattcgagtggctaattgaagaaagaaggtgaagtggaggaagggagggaggttttataaggacagaaactctactattatttttagagtccttttaatgatgttgaaagaacactgtggcatagtggaacatgcccttgactggaagttagcagtatcagcattgctgctgtgtggtcctggataagttatttcctctctctggtcctcagtttactcatttacaaaacaaagtattaataattggcacgatcacctataaaatcctctctagttccaaggttctgtgatgatcagatcatcagcattagattggaagcatagaggcttatttaagaagaaatactagcccctttccttttttgagaaccttttatcataccttcttttagagaacaaacacgaattggaaataaacttttcccacttccccgtccccaccccttcagtcagttttcaactttctgtctctgggaaaggagggttgaactgtattttcttattattgcctcatttttttttctttttctgctttttcttagggctagcaattggacttttgatgatgtttgacccagcggcaggaatagcaggcaacgtgatttcaaagctgggctcagcctctgtttcttctctcgtgtaatcgcaaaacccattttggagcaggaattccaatcatgtctgtgatggtggtgagaaagaaggtgacacggaaatgggagaaactcccaggcaggaacaccttttgctgtgatggccgcgtcatgatggcccggcaaaagggcattttctacctgacccttttcctcatcctggggacatgtacactcttcttcgcctttgagtgagtttcggttgagtagagttacctgattatggttactttgggtccaggggaagaacctgctttctggggagtttggggctggtccttggatgactttaacgtcctcttgagcgatgtctgtagagatgccagctgaattcattgcttcgtggtcatcacagagtatgtacttcctaaaaagaccaatacctttgataccaattttgtagtactgatttggggctgtccttgatagacttgggaaataagaaagtttgtcttaat

SEQ ID NO: 138925 - DNA, 1030 bp, Homo sapiens
tccaatatgttttccactatgcttaccttgtaataaagagaagagatgagggttagacaaccaagtccaagttaggaacagatctccttgctgcatcatgacaaaacatgaccctagaagaaatacaagaaaccaaagccctgtttgaagagagaagtgtttgtctctcccaaccccaagcccccataaaatttattcattcctattatatcgttttgcctaatttcaggcggaaattggctgagaggtctgaggctagtctgaaggtgtcagagttcaatgtcagttctgaaggtaagttgaacaaaggaagatacccatgcatgaaacctgtggagttccaagggcattgtgttcacctcaccccccctaggaactgtttttgatgtggttaatgactcataccataaatacctgggagagtgggtgaagaagtgtagtcagatgcccttcagtttcttccatctctcaaagaaagcctagaaggctgtggtcaaggtatcctacagagtttgatgagatacttataggatagatggacatgaataaagacagctgcctcttagtaacttagtcataattcatatttgtacaatttcatttttatttcagttctcttaacaatgctttgagttaggagacaggcaaatattctcttcagccagagctcagagaggtcacattacttattcaagggcctttgcctagtacagtatttctcaacctttgcttttttattgctcccctgagaggagcctttcaagcctttttttttttttttttttttgagacagagtctcactctatcgcccaggctggagtgcagtggtgcgatcttggctcactgcaaactccgcctcccaggttcacgccattctccttcctcagcctcccgagtatctgggactacaggtgcccgccaccgcgcctggctagttttttgtatttttagtagagacggggtttcaccgtgttagccaggatggtctggatctcctgacctcgtgatccacccgccgcagcctctcaa

SEQ ID NO: 138926 - DNA, 1042 bp, Homo sapiens
aaaaattaaccacgcgtggtggcacgcgcctatagtgccagctacttgggaggattgcctgagcctgggaggcagagatggcaccactgctctccagcctaagtgacagagtgagaccctgtctcaaaacaaacaacaacaacagcaaaaagatcactttggctgtttttatttttggctgttatgtgaagaatgaattgcaatggggcaagagtagaagcaccaggagaaaagcaaatgagttttgaataaatattttcccctatcttctaccccctaacacgtttggggatgaatgtagaagagtgatagtgttggcatggctagaaataggcaattgaagtaagagaattattcttgcttctctgcacatttgccatctactggcattttctactgaggcttctccctacattatattgagatcttgtctcacttcttggtctgaccagaaagtttgacctttccacaggatcaggagaaaagctggtccttgcagatctgcttgagcctgttaaaacttcatcttctttggccactgtgaaaaagcaactgagtagagtcaaatcaaagaagacagtggagttacctctgaacaaagaagagattgaacgggtaagctacagagaaggtggtctattaagggaaagaaattgaattgacaagggaaaatagggtaatagaaagaagggaaagacctgaaaaatgggagaagggggagttgtgatttccccactatggataagattaaaaataatctaggagtgccaggcgcggtggctcacgtctgtaatcccagcactttgggaggctgaggtaggcggatcacctgaggtcaggagttcgagaccagcctgtccaacatggtgaaaccccgtctctactaaaaatacaaaattagccgggtgtggtgtaatcccagctacttgggaggctgaggcaggagaatcccttgaaccaggacgtggaggttgcagtgagctgagattgcaccattgctctccagcctgggcaacacgagtgaaactccatctaaataata

SEQ ID NO: 138927 - DNA, 1029 bp, Homo sapiens
gtaatcttggagatagcaggaaaatgccaagtttgttattaaaaacgagatggggccgggtgtggtggctcacgcctgtaatcccagcactttgggaggccgaggcaggtggatcacctgaggtcaggagtttgagaccatcctggccaacatggcgaaaccccatctctactaaaaatacaaaaattagcggggcatggtggtgtgtgcctgtaatcccagctactaggggggctgaggcaggaggatcacttgaacctgggaggcggaggttgcagtgagccgagattgtgccactgcactccagcctgtgcaatagaatgagactctgtctcaaaatatatatataaataaataaaaaataaaaactagatggtagtggaggaggttacactaagaatagaacaacctcttcaagatagagtgaggctcagatgtcatacattgaatataccatgccgttcattcattctaagactgacttttgagaaattatgctagtagggcacagagaaataaggaagtgcttagttcagagggtgctttgtggctagcaactcctaggtctctccttacaacttagattgcaaagtaccaacaactagtatatgctgtattaggatttctagaaactgaatatcaagtctcagaccaggcacggtggctcacgcctataatccaagcactttgggaggctgaggcaggtggatcacctgaggtcaggagttcaagaccagcctggccaacatggtgaaacctcgtctttactaaaaatatgtaaattagccgggcatggtagcacatgcctgtagtctcagctgctgaggaggctgaggcaggggaatttcttgaatccaggaggcagaaggtacagtgagccgagatcacgccactgcactccagcctgaggaaaaaaaaaaaccctctactctttccccgccctcccccaaaaaaaagaaaagaaaatcgaaagtctgtactatagttttggtccagctccctaaaattttgtttagctgcaaataatta

SEQ ID NO: 138928 - DNA, 5193 bp, Homo sapiens
tctactaaaaaatattaaaaaattagctggacgtggtggcttatgcctgtaatcccagctactcaagaggctgaggcaccagaatcgcttgaacccaggaggcggaggttgcagtaagccaaggttgggccactgtactccaacctgggcaacagagtgagactctgtctcaaaaataaaaaataaaaataaaggctatgggccgggcgtggtggctcacgcctgtaatcccagcactttgggaggctgaggtgggtggatcacaaggtcaggagatcgagaccatcctggctaacacggtgaaaccccgtctctactaaaaatataaaaaattagctgggcacggtggcgggcgcctatagtcccagctacttgggaggctgaggcaggagaatggcatgaacctgggaggcggagcttgcagtgaaccaagatcgtgccactgcactccagcctgggcgacagagcgagactctgtctcaaaaaaaaaaaaaaaaaaaggctatgaaacaatggtgaagacacctgttggatctaatttaacttagggtgtacaaactgattttattaaaatttcaaaaaaattgaattttaagcttttaacaggggaggcaaatcttgttatctgatgagaaatgtgtttggggaagagctggtctgtctccactgctgcctcctctctctcaccttcttcccctactgccctactgaaacttctctcaaaaggcattagtgaggggcctccgaattgccaaatcccaagccctcttagtctttagcatatttgacaccattggcacatttcattctaaaaatctctcccctctagcttctgtgatatactctgggtattttctctctctggctttccttagtcctttttattcttgctctgtaaattccatgacttttttttttttttttttttgagacggagtcttgctctgtcgcccaggctggagtgcagtggtgcaatctcggctcactgcaagctccacctcccgggttcacgccattctcctgcctcagcctcccaagtagctgggactacaggtgcccgccaccacgcccagctaattttttgtattttttagtagagacggggtttcaccgtgttagccaggatggtctcgatctcctgacctcgtgatccgcccacctcggcctcccagaatgctgggattacaggagtgaaaatttcataactttcgactatcactctcaaccccttctttgaagctccagtctcatattccatgtgactagcagggatcacctgggtcccccatatgcaccttaaacttagtccagtccaaagtaagcttcgcatttcctttccccagacttccaaaacctataccacccccttcattctgcaactcagttaacagcataactccctaccccagtcacttaggttggaaacctcagtcatttgattccttcttgaccccttcactgtctccctctccgccagcttatacagggggctagacctgcaaattctgtctctgtaatagcccttatgctcctattttctcttcattttcattttcactgccctaatcgaggccctcattgaacctttcctttggaactttacatatatcctctacacaatcagcaggattttcttgctgaaacacagttgatcattgctctcctgcttaaaatccttcaaaggctgttcacttacagaataaaataaaattacgtagcattttagctatgctggacaacacgttgttctattacataccactcctttccctgtgtctgtgttttttgcttatgctcatctgtttggattttttttcctcctgacagaattgtacttaggcctcaaagcctaattcaaaaggtcacttccttccctaagcctaacctacctcccaataatatttaatggtaatttcctctgtgattacccctatagaataacgtagcagttatgttatttaagggtaacataaagggtatttaacccattatgttatgctgtttgtgttgtatatgtctctgctctcaaaggctgtgagctctatgaggacaggaactatcttaatcaattgtgtattcctagcaccccatacaagtgcctggaatatagctacaatcaataaatgtttgtaaattgaattgaattgaagggacattacaacattgtagtataaatcactttgtagcctgagattgatcactactgcaaatactaaaagtggaagaacatatacctttactattcagtagaatagttttatggttaaatcaatagcatcgtgtaacatgtgatgatgtgcgtttatgcatttatccaaatatttgtaagtttaatactgaccacgatgtatatggctattgaagaaaaccacacataatatgtgtgtgaggtttgaaactagctctgttgcctagggctgtctttgtgccttgccagaatgtggaccgtggcatgatcggcctgaatatttagccatcctcatgatagcatgtggaataactggtttacagttcattcgtttcatacatactctgcctagcatgtaaaattaactggaaactgaggaattggagccaaagttagaaaatgaggagagttcaacttgaaccatcaggaaacaggctgattacatgaaggtctttttgtttgtttgtttttaacataataaatagagatggggtttcaccatgttgcccaggctggtctcaaacttgtgggctcaagcaatcctcctgcctcagcctcccgaagtgctgggattacaggcctgagccaccatgcccatcctatattttttttcaggcaatatccttttgtgctcaagaaattaagacacacaccccaccacaaactacatttgaagactctgccaaaaaaatgccatgttttttctcattttctttcatcagtaattaatgataccaagaacacttatatgcatggtttatagcagttggctatggtcaaaaaaagttgggcttcccctctgagacatttgcagatatatgtcctaggtataccatcagtggcaaataatgcttatcttaagatctaatctcacagggcatgctgggctcacgcctgtaatcccagcactttgggaggccaaggcaggaggatggcttgaggccaggagtttaagaccaacctgggcaacatggcaggaccctgtctctacaaaaaataaaaaaagttagccaggcatggtggcttacacttgtggtcccagctgcgcaggaggctgaggcagaaggatcacttgagcactagaggtggaggttgcagtgagctgagattggagtgccagtggactccagcctgggtgacagagcaagactctgtctcagaaaacaaaaaaaaaaaaaaaaaaaactaaccgccccttccctctagaaatattctaaaagaaggcttatgatatgaatttgagattcctaactataaagtaatagttatgtgcttcaaatgatacataacaatacagggactcaagggcaatgtgcctagattcttaagagaatggaaatcagtttaacatatattggtaatctgggccggcgcggtggctcacgcctgtaatcccagcactttgggaggccgaggcgggcggatcacgaggtcaggagatcgagaccatcccggctaacacggtgaaaccctgtctctactaaaaatacaaaaaattagctgggcgtggtggcaggcatctgtagtcccagctactcgggaggctggggcaggagaatggcgtgaactcaggaggcggagcttgcagtgagccgagatcacgccactgcacttcagcctgggcgacagagcaagactccatctcaaagaaaaaagaaaaaaaaaaacatatattggtaacctgaacacagtgatccccctcagcagtattagagagtagcctcagcgtctccctgctgaagttgtcttatataagaatcaaataaggctttatttatacttctgacaacaagactggaacccccttctcttgctgtaacagccaatcctatccacttatgattccaattatagtgtcataagttagagaatcataggaatgtaaagagagaaagctgtaagagcatggcttaagactcagaatgttttgttgcttctttaaggcaagaactcccctggagcaggaaattttcaacctcctccataagaacaagcagccagtgacagaccctttactgacccctgtggaaaaggcctctctccgagccatgagcctagaagaggtaagtgtgtcataggcccttcagcacacccaggcatgccacgcttctcctagcatttgtcctctggcccaggtgtcactgtaagtctcatttgttgtaggcaaagatgcgacgagcagagcttcagagggctcgggctctgcagtcctactatgaggccaaggctcgaagagagaagaaaatcaaaagtaaaaagtaaggaggcccctgtgaactggccttgggttccacagaagaaagtcatgtggttcatcatgaattctttggagagaacctttgatgcagcaactagagtcatgcagatgaggtcccaaacaggagtgactagccttttgttccccccaaaccaacctcatacagttttgccaaaaagatgactattcagttactttctctgccttccaaggcatcacagagtggttctgcagaatcagctctgaattccagagctgttaaggccaatagggcttccttcctgcctttttgcctctttgaaacttgttcggccgggtgtggtggctatgcttgtaatcccagcactttgggaggccgaggtggatggaccacttgagctcaggagttcaagaccagcctgggcaacatggcaaaactggctgggcacggtggctcacacctgtaatcccagcactttgggaggctcaggcaggtggatcacttgaggtaaggaattcaagaccagcctggccaacatggcgaaaccccatctctactaaaagtacaaaaattagccaggcatggtaatgtgcacctatagtcccagctacttaggaggctgaggcgggaggatcgcttgagcccagcgggtggaggctgcagtgagccaagatcatgtcactgcactccagcctgagtgacagagtgagaccctgtctaaaaaaaaaaatgaaacttgttctacccctcccttgagttatagaggca

SEQ ID NO: 138929 - DNA, 1451 bp, Homo sapiens
caagtcaaaggcaattatggccaaatatgacctggaggtaagagacccttggggtgagagaagatctggaattggaggatgctagcagaagcagagttggggaagagccatgaggatggatggaaaaccaggaatctaaaaaggcatcagaaaaatctctaaggcagaaaggaaaatgaccaggaacaaggtggaaaaggagagatgaaagggaaacagcattgaaggcaagtccaaagggggagaggagctttttaaaatcttatttcaccgttgattccttgaggacaaagaatttgtcttccattttataccatagctattaacccagcattgtatatgcagtttaaacagtaggtaccagtaagaaatactcaccaagtcaaattgagaggaggcagctttatgaaatggaccaggaaaggtgttattgcggtcactaatgacagggctctcatgctgtgactctttcctccaggctcgccaagctatgcaggaacagttgtctaagaacaaagaactgacacagaaactccaggtagcctctgagagtgaggaagaggagggaggcacagaagatgtggaagaactccttgtccctgatgtagtgaatgaagtgcagatgaatgcagatgggccgaatccctggatgctcaggagctgcaccagtgacaccaaagaggctgcaacccaggaggaccctgagcaactgccagagcttgaggcccatggagtttctgaaagtgagggagaagaaagaccagtggcagaagaagaaattttgttgagagaatttgaggaaaggcgatcccttagaaaaagatctgagctcagccaagatgctgagccagcaggcagtcaagaaacaaaaggtgagctgtgatcaaatggaagagggaaattcctagtgctgtggacagactatgggagaaaaaaaaaatgtgtccacccacacacaaaactgcatagtgattaggcgctggggacttgcaagagtgcgtacactggatccctgaagagaaattagattcataactatttttcttcgaagacatttaataagcagtcatctgcatggccgtgcaacgtggttcaggcacattttctgttcttgggggcttacagccttcagaaacccataataactaaaccatactcgaagtcagggtatgagttagcgttcctggtacctacacaccagggagaagtacgtatggtagaatggcaaatctgaaagtccattcacacctgtagacacagataggtcaattttgagacattaggaaacattgtctagttgctggatttttttgttttgttggttaagtaggagtggcatttttagcacttcttaatgctagttgatgtgtgtatacatggggtgagactttacggaatgaatgactccacagggccacatggcaaattagaattgtgactccatactcagg

SEQ ID NO: 138930 - DNA, 1051 bp, Homo sapiens
gatggcaaaaatctggttttacacggcaaaagaattatttttttctacttttttttgtttaagagacagggttttgctctgtcatccaggctggaatacagcagtgcaatcataccttactgcagcctaagacctcccaggctcaagcgatcctcttggctcagcctcccaactagctgggactacatgcacgtgccaccatgctgagctaagtttttgtagagactgaggtcttgctctgttgcccaggctggtcttgaattcctggcctcaagctatcctctcacctcagcctcccaaagtgttaggattacaagtgtgagccaccgcacccagcctccttttttttttcctttttttttttcaggtttccacatacaaaaatttattttaaaagagctatcatttagaatatattatagggacctttacttaatagttttggctggatatttttgggattaataattgcaagtagtcacttctgagagaattttggaaagcagcacagcgggctgagattgtgggggtgtacatatatgaccacaggaccctagtggctttctcttgagccccctcaacaactggccatctagctaaatgtgcagagcggctgactgtgatatgaaagaatgaaagatagatttgcatttccttggacagtaaataaattgaattttctcacaccttccaagagtgtcctaaaatactggaaagccacggaccccagtgaaaatgagcaaggaaacctgattcttgagaaataaacgtacatgtgtccaaaggccagatctaaggagctacaatggcttcatgccaaagctagacagcaggatcaacttgggaatggaggcaacttgagtcaatgaaaaagacagtttagaagcatgtcactgccaggtttccctccagactgttttgagacaggtctctgtcatacaggctggagtgcagtggtgcaacctcggctcactgcaagctccacctcccaggttcaagcaatcctcctgcctcagcctgcaagtagctgggattacaggcatatgccacc

SEQ ID NO: 138931 - DNA, 1030 bp, Homo sapiens
ttcagtgggatctcagatggtctaagactccccagttaatctgaaacttaaagtgaagcgtcctggcacctgtcttttcagggatataagctggaggaagcctacagtctggccacttagagctcctgctgctaacacgggccattccttcctccaccctgcagcttccttactgaaaagtttaaaattgtgtcatatgataatgagctagggatatttaccctagagggaagaaaatttgagcatgattggctgtgcactggtttgtatcgcaagaccatcattgttcagcacttccccctagggggcgctaaaatgtcacgacccgaaattcaagcgttctcgccatgaaccacagctcataagccaagctgtagctctcgcttgtttcttcccaggaagatgaagaggagagaaaccataggcagatgataaaggaagcttttgctggggatgatgtcatcagagatttcttgaaagagaagagggaagctgtggaggcgagtaagccaaaggacgtggacctgacactacctggctggggcgagtggggtggtgtgggcctaaagcccagtgccaagaaaagacgccggtaagaatgccgaagaaagtctgtcaaaagggcaccgggttctcccctcgcccttcggtgtcctccctacccttttgactaagtccttaatgctcctagtcagatgtcctgttgttttgctttccaggtttctcattaaagcccctgagggtcctccaagaaaagataagaatttgccaaatgtgattatcaatgagaagcgcaacatccacgcagctgctcatcaggtgagagcttagagagctctttagctgcctgcttgttactgcctggctctcttgcttgagaggagtattctagtgatctgtagtcaagagagacgtgtgatcttgaccgcagaatcaaatctgttgttttcactgaatggctgttagatttatcatttcagatagactacgctgttttaattactggccaggaaaaaagtttagagtcaag

SEQ ID NO: 138932 - DNA, 1065 bp, Homo sapiens
aagtttgggtgggaaagtgaacaccggagtggaacagagagggtgctggagaaagtgacacaattgttggggtagaataggaaaaggtagaagccactgatgattacataacccagagggaagaccctaggcctttgagttttcaaagagaagggaagtttcttaatgctggagtttgaattaggtgtgagtccatggttgccagagtgtttagtgtcaggatggccaaagagggaggtaatatctacttttcggccactaggatgctagtacagtatttgatataattttacatatgaactaggctttattaatgcccatttttgaatggttatccttaaaataatgtagaaatggttctttttctaaattaaatcattccctttcccactgttcataacttaaaagcaatcttttatgatgagaactttctttggcgaactgaagtttcattctggtcaagagtaaaatttaactctgtgtttctatccccgtaattcaaatatgctgttctagttttcttttttattctaagcagaagtgaccttttccccataaaacataaaaaaggatcttttttttaaaaaaaaaaagtaactgagtaactgcaggctgcatgtcaaggtcatattttccctggtcaatgaattatgatgaatttgaatacagctgatatattatttgtaaaatgtggtaattttcagatttactcatcacagtatgtgaggcaggatacctcttcatttgtattttaagaaaaccttaagctgaaggtccgtgaggaatccagagtaccaaggagcagggaaagctttgtgttttgggcttctttaccgtgggtctgctgagaaacaaaatttggttacctcattactaaggtatgcctagaaatcatagtgttagtgccatttaagggtactgttgagttttgttataatgctgatgtccagggacaaggagaacaagcagatttttgcttttccaagttttgtggagaagtgcaccgtatatgactatgatcgcagaggtgagttgatgcactgtatacctgaatccatgagatga

SEQ ID NO: 138933 - DNA, 1052 bp, Homo sapiens
ttgcccaggctggagtgcagtggcgctatctcggctcactgcaagctctgcctcctggattcacgccatcctcctgcctcagcctcctgagtagctgggactacaggcgcccaccaccgtgcccggctaattttttgtatttttagtagagacggggtttcactgtgttagccaggatggtctcaatctcctcacctcgtgatccgcccgccttggcctcccaaagtgctgggattacaggcatgagccactgtgcccggccctattattatattattatctaatttttcttgttcaattgtatcctattatgttatagtaaacatggtggcagcatgaaaactatcaacagcttctcagtggtccccttatatcttgattctctgtcctctttcttcatattcctgttgtattagtacacatttggcatttacaacatgctaggaagaaagcttgactcatcactgcatctacctttgaggtggaagtggcggcttctttaacagctatgctgtaacactgctcaatagttcaggacaggaactgaggagtgtatatccagttgaaactctagggaacatttcgggccatgggtgacatttttaaaaaccattgctttctgaaaagggctgttgtgtttatttaattaattaatttatttgtttatttattgattgatttatttgaaaccgagcctcactctgttgcccaggttagagtgcagtggcgtgatctcggcttactgcaacctccgcctcctgggttcaagcgattcttctgcctcagcctcccgtgtagctgggactataggtgtgagccaccatgcctggctaatttttgtatttatattatttatttattttttgagatagagtttcgttcttgttgcccaggctggagtgcagtgatgcaatcttggctcactgcaacctccttctccttgtttcaagtgattctcctgcctcagccttctgagtagctgggattataggcacccaccaccacgcctggctgatttttgtattttttctagtagagatggggttttgcca

SEQ ID NO: 138934 - DNA, 1063 bp, Homo sapiens
tgcccccccaccatgcccagctaattttttgtgtttttagtggagacagggtttcaccatgttggccaggctggtcttgaactcctgacctcaggtgatcgcctgccttggcttcccaaagtgctgggattacaggcgtgagccaccatgtccggccagtctatggtccttttctaagtgctttcatgttattccaaatttttagtagggactagtagtttattcccattttgcaggtgacatggtaaatggacatagagagatagtctgagatggctgagaagtggggactgggagtgttctccaagttttcccaccgcagtgtaggctatgggtgctagagtatatcacttttcaaggcattacttgattagatggttctgtttaatattgctgctgtttgagtagattgttctgaatggattttggatgttcctaaacatcagatcgaccctgaaaggatgggttccagcactaatgaggagagtgaaaaggacgtagtattggtctggatgctaacgctcacagaggaactccagggagattgcaagccctggccgctcggctgagatgactgtccagcctcctgaggcgactactttggggtaactacattcatttgaatgataaacgctcatgtgtttaacagcagttaacattcctttgtatccagtctcataaatgtttataggtaaggttttagacatggaagtacccaaagagtctatgaaggggtccatgctagacctatatgccggcaactacctagccttcccactaaataccagaattaatgtatctgggcaaaagatacaatatgccttataagactgatcccttggggtagatatcagtggaaatatttggataggaaaaaaaaaatccaggggaagtagaaagtgttagaatagatttttagtcaggcagaagtttgggatgaacagcagaaagggctgttctttctcctttaaattgcctggcagattatttctagttgattttgtgtgtgcagtagtagaggaaccaacttggcatgaagagaagcaaagtaaagtgtttgggg

SEQ ID NO: 138935 - DNA, 1050 bp, Homo sapiens
tttttcccagccacacttatggctttggattggcagagcacgtgctctcctttgtcctcaccatgagttggatatatcttttgagttttttcccccaaagtagggatagctcacagtggttcctctgccttccaggcagtgaccagggttgattcttgggccatgcagctgttcatttctttaacaattacatggttgtgacatctgggaaaatcctttgaggtatttcatatccttgtgcctgtgcttcctgggtcatttgggattaccaggtttcttccaagttcctttttggaactttgcttttgatgtgatgatttccatcagagagagggagagtaggcggggtggtggggggaggtgggaagggagaacacatgagtaccggtgcttcaagcaaaagcaagccagcatacaagtgtgtaaaccagcagcgcttacgaagtgtggcatgcctgcaaggcttttcctttttgctcacctctcctgggatactaatttgattggctataatataataaaacaaacccctaggcctactgaatcagaatctccaggactgagacctaggaatctgtattttgaacaagctcctcggtgattctggctggggaaacattggttgacattgaccgtcctgactcctcccttctgtgagcattcacgcagtcaggagtctgttctctagggccgctttagaggttccctttgctttccctctggctggggaagaccaatcttgccttcttgtatagaccatgtagctcagtgtcagtgttctcctgcctgtgttttatccctcccctcctctcctctcatctgcagaggctactgttaattagcaacagtgggcttcagataggaagtggcgctcctgggacaaaatcatgatagaaaattgagaggcaaagatttaagtggatgctccatcttgaggatcttgtgaaaatggagttatccagaatcagcgttgctctctacgtggtcataacatgtgtattatatagtaattattttgatattttaactcggttttattttttgtggttt

SEQ ID NO: 138936 - DNA, 1046 bp, Homo sapiens
ggctaattttttgtagagatggggtttcgccatgttgcccaggctggtcttgaactcctggactcaagcaatcctcccagctcaacctcccaaagttctgggattacaggtgtgagccactgtgcccaaccagtgttgttggttaaaatggggatattccaagatattctgagaaacagtcaaaacttgattaaccaggatgttcagggaacggggtccttgttaaaaatatttctaaaattatgctaacccacataactgtcttcataatgttaaaagataattgtcagaaaaaaggtaaaaaatcatgactctcgtacagatacaaaaatgaacacgtgttaaagattttattttactcattaatcaacaagagaaccagacagatgttatagctggttcaaacaaaaagtcaaaaagcacaaatttatatggagtaaaggaaataaattgcaaatggaggcaaaagtagtttttctacagtggggaggaaagacaatccaaactcaatgggacaagacagacttcgcatatacatcagttacctgcaattacagagatgcaaaatagcttgaagacaataacctgagctaaaatcagatagcccagaaggttatgctatagacagtgcatagttttttcattggagtacaaaggtttttctgtagtaagcaaacatggtggatgctttgtgtgtgtgtgtgtgtgtgtgtgtgtgtgtgtcggggggtggctgttgattttgcttcttgtgatttctcagggccgtcacttcagttcttatccagaattcagttccatataacatgcatttactgagtagttactatacgtaaggtgtcgtggaggaaacaaagacaaaaaaggatgctttttttttctttttcttttttttgtttttgagatggagttccacccttgttgcccaggctggagtgcaatggtgcgatcttggctcacctcaacctccgcctcccaggttcaagcaattctcctgcctcagcctcccaagtagctgggattataggcatgtgccaccatgcccg

SEQ ID NO: 138937 - DNA, 1018 bp, Homo sapiens
tttactatgttggccaggctggtctcgaactcctgacctcatgatccactcacctcggcctcccaaagtgctgggattacaggtgtgagccactgcactcggccgcctctctcatttttagagaaggcactgctccttcatgcttgctggtgtttttttgttgtttcaatccattgactgtttaaattcaaatatacatcagataaatcaccaagacacagaacaatatggctttccctgggattcaagatctgacgtttcttgggtaaatcttagaaatgtgtgtgcgcatataggggagtattggtaatttgaagggaaaaggaatggaagtctttgtgtttatctactttgttcttctgttcctaactggagaagtatatacttgtctgaggtcaaggttagcagaatagacctttttattttcttaagccattagtgcctgatagcttaatgttctctgtactgaggaacaagttagagatgggcttaaaaggaatttaattttaggataaaaagagtcaagaccatggaaaatgagatgaaattcttaggtgctcaggaagaaaagtgttttcctttacatatgaagcatgtcctcagatgatcactaagagatgatctagggaaaggcagggtgatgataatgatttgcgtaagtattcattggcaggtcatgttgacctagttataagtagttgagactttgatgcagaaatctggactagagccttcaaaagaccagcggggccgggtgctgtggcttatgcctgtaatcccagcactttgggaggccgaggcgggtggatcacctgaggtcaggagttcaagaccagcctggccaacatggcgaaaccccgtctctactaaaaatacaaaaaaattagccaggcatggtggtgtatgcctgtaatcccagctactggggagactgaggcaagacaatcagttgaacccgagaggtggaggttgcagtgagccgagattgcaccactgcactccaaccggggtgacagag

SEQ ID NO: 138938 - DNA, 1041 bp, Homo sapiens
accacgataaccttctagcaggcgaggcatgggtcagcttaggggaaaaacagctcaagcaagtttaacccttcctttcctcctcggacctgcttttattgttccaacgttttgcttattctgcactccctgcatactagaatactggaaatccctacattgccctatttcttgtttagtggcacagagagacctcaaagctcgtgagaatacgtgactgttaggctgagagtgtccttgcagtgtgtgagcacagccattgtgcctcttagatgtgccaggcagtgggcgtgggagaagctgagctgaagcagccgaggaagtgattcagggaagataggtagcgagagctgatgcccagaggcccgggctgggggccagacccccgggtcctagtcccaattctgggtctttctcactgcaagcacaaatgtgctaacttgcgggttggcctggtaagtggcagtccctgagccagtggacacatgggattgtgtgttaccctggacaagtcattcaaccctttgtcttggagcctccgttttcttatctgttcagtggggataatattagcttctcctcccagggttgtggggaggataaaatccaataatagagatgagagcatttggaaaggctgaaagtgctacagagtataaagtggcattatgaataatgcttgggccttttcactgggttttataaatatgaggatatttgaattgctcctgtgtcatgtttttcttcttgccttagttgaatctattttctggtattaatttacacgtgaaaagagacaatttttcttgagttggcctgtactgagaattattttcagttgttggtgcaataccattcacagtgaagttatttgaacaatgtagtctcccaacttgcagaagaggcattttgtttaatgccggtctctccattggtgtttgggtacagagagtatggggcctgactttgcaccttttaaaatgactttgggtgtttattcactggcttttgaacgcagactctgtagacctctttaaagtg

SEQ ID NO: 138939 - DNA, 1025 bp, Homo sapiens
gtgagtgagactaaggtgatggcccctctcagcatcttctatgaaaagagagatcgaaatctggttgagcagttttaccatgggcccaggtgtcgagttgggaatttgattcactgtgccacaatgcccagctccttgcagagataagagagccctgggtgggggcaggggacaaatagtcctcaaatattgcccactgtttgaggattatttgttcaacttttcagagcagggatttgacatctcttgttgggagctgatggtggaaagaggtaaggcctgtgccactcgggaaagctggttcaactccaagctttggcacctcgtcattactggggctaatctcaggcacagacatttaactttctaccttggtcttattgccctatgtgacaggcagcctcaaagttggaaaagtcattgaatcgtcagggctggcagaatcacatttggctccctgaatttgtgttggtcaacctctagggactaaaaaaagctagccctttctagccaccactaccttctgctagcctccacactggtatccagggctggagatagttgtcccagttcacccaatttccatgcaaattggatagaatggggaagcaaggtatagtgtaaactcagttatctgacattctagtaaccggcaccttagcacatggcaagcgaggtggtaattggggctcataatgatggcctggaggccttacaaaatcctgaagtgtcctctgaattatcaaagagcaattacattacagccagtcccattttagtgttaaacacattgtactgtatttgattctttggaaattggtgatccctttgtgatctctatgatgattctgtattaaccagaatattagattaaccagaacactttgttttgcctagtctatataatggaaaatgtgctgttatttgctgtcttttagcagtgtgactaacttgaagctttggtcaagggctacttactctatttgcctcgaaccatttctttcttctgctgacttcgcttgggt

SEQ ID NO: 138940 - DNA, 1057 bp, Homo sapiens
aattgattgcctcctatgatgtattcatcctgagctgccggtaaacatccgctgtctccttattagctaaaactgaataacctcatattgagtgggtagtagagtccaggtttgctataatgcaaagacggcttaacctcatttccggctctgtttaagtggaggtgtatatgatacccatctctacgctcaagagagtaattgagctaattttcatcaactatgtgacagagtgggaacaattctctttcttctgctagagcaataatagattggtcaggaatgagttgtcaagctgttggcctcagccacttgtgttaggatgaagaggagcttttgtgtatcacctaatcttctctaatggcacctggtttcctagcatggaagcttcctgtggaacatattggcgcttggaaccagaaggaccttcgaggttgcctggtccagtttgccacccaatgcaaagatagagatctccacagcattcttgacaggtagccagccagccttttcatgaacacacctccagtaacgcagagaacaccaccaatcaaggcatcctacttgatttgggggcagctccagttgttggaaagtaggtcattcttcctctgtggatgtgtctaagggttttgcattgaggcagctggatttggcacatggtctggttactttcctccagatctgatgatggcatcttcgtgcaggaatttggcaaaggccaaatgaggcaggttaccctgcttctgtctgagcctcctgacttttcttttcatcctggttttggttatctcccttcttgacctgcggagcaggtaggcagagccacttccactcacacacctgccacctccgctctctagtcctttgtgggctactataaagccttcacttctctgcaattgaataaacacccgagcctgccctgccctgggtaaacaaggtggggggctgtttctttgcctgtagcattgaacactgtaatatgacttcttcatgtttcctggggtcctcacaaggcatggttctgttccttcctcttttgcctcagcccaaa

SEQ ID NO: 138941 - DNA, 1129 bp, Homo sapiens
atttattgagcacttcttttgtcatgtgaagagcctgattactttgtatcatttaatctcacagtaagccgatggagtagatttattatccccattttataggtgagaaaatcgaggctttgcagtgttactgatatgtctaagatcactcaactactacgcatatgagtctgaattcaaaccaaggtcttttgattcccaagtgccagggtaggtggaagactgactcattcaccataattcagttacaccttggacgtttccattgttccccactttttattgagtgtgtatctttgcctaccatatggattatttcctcagggtatgctcctagcagtggagttgctgggttagttacagagtgtgcctttggttttaaggctttccatccctatacctgagttgtttcacaccagccacactcccagccagactggtcagctctggggagctgacgtgacagtgtctcactggcaagcagcccatctttcatgagcacctagtgtgcgtgcctggatagctgccgagggagacctaaaacaaaaatcaagaccaatccctgccgtcaaggttaatttaattgtcttgtaccctgggcaaaaccagccaacaggaaaccattggaggggccaatgggacagggctggagcactaaggcagcctgtcagggagggtggaaggagcccttttgggcctgggggaagaggcagacatctgcactggtgaggagggtgggaagcctcgggctttctcccgggtaaaggagcttgacagtttctatatacagccagcagcacccctgacacaggctgcacacacagccgctctagccagctagcctgtgagctgtcagacagaaaggtggagtggcccatctccccagtgccccagagaggactggcaatggtgcagctatgggatccattgtttggaaagccaggcagccattaatgctgccagcctctcccctcctcacctcattcacccagcttcagcccatgctagctagggtgcttcaagtccctggtgtcccacctgtagtcctagcatcatctcaatccaaggaaggcagtcattaaagtgtggatgaatggcagtattggattatcctttttttttttttttg

SEQ ID NO: 138942 - DNA, 1216 bp, Homo sapiens
cctgcaactggttcctcttttccgatgtcttgaagaggctgaagctttcctcgaggatctttcaggcccggttcccgcactttgaaatcaccaccatgcccaaggccgagttctacaggcaggtggcctccagtcagctgctgacccctgccgagaggcctggaggcttggacgacagatcccccccaggctcctctgagactgtggagctggtgcggtacgagccagacctacttcggctcctagggtccgaggtggaattccagtcttgcaacagttgaccgggaaaacagcccctcctcttctttctccttccgagttcgcccttcccccacctccttgtctttccccgaccgagcaccagactgcagaatgaggcaataatacggaccaacaagaagccgccttatcaatgccagcattagcgactggactgtttttgtttttttggttacaattagttctcatctccctgtcgtcgtcattgttatcgtggttgctgatgggggtggaaagttgaactccatgtctgaggacaagaggtcccgggggtggtgggaggtggcgccggggtcccttggactggcctccttgttcatgaccaagaccaaacctgggccctggatggccttggcctgtcccgaggagaaatgagaaaatcccagatctctgagcgccccccaactccattcccctgtgttcttctgtcttctgtagtatttattttattagtatttaatttgtattgtttcattggtttctgataagtctgtatcactgtgacgatttgagacaacttgttgtattgagggactttctgtacctccttttctttttctttgttgatgagctctgacaaagctattccctggtgtttttttcccccactggggagggggtgaggtggaatggggtgggggaacatggacttgtgactaacgaagctggttgctgctggcccagggctgggggcttgggggtaaatcctgaggctttggtgctcccccacccacccattcccgccctttgcagcagccccgctatcttgagattagtgttgacagggaggggaggattgtgaggtgaggggttaataagttactctaataaaggagcgtggagaagggatctgaggggtgagggtggcccccctcctcacgccttcttcactgcccccctcagagtgcacaatacgagtttgttcctgcctccactc

SEQ ID NO: 138943 - DNA, 1154 bp, Homo sapiens
aaaaaaaagaaacgaaaaggaaagaaagaaaatccatccacagccaggcacagtggctcacgcctgtgatcccagcactttgggaagctgaggtgggcggatcacctgaggtcaggagttggagaccaacatggccaatatggcgaaaccccatctctactaaaaatacaaaaattaaccgggcttggtggcacgcacctataatcccagctactggggaggctgaggcagagaatcccttgaacctggaggtggaatttgcagtgagtcgagattgtacctgggtgatcaaagcaagactgtctcaaaaaaaaaaaaaaaaaaaaagaaaagaaaaaaagtacaatccatccttcaagatctgattggttccactcaatcagaatgtccttcctatcctgctagtaccaattaaattgtgtccctccttcaagactcgattcatggactctgcctccccagaccagtctgtcctaagtgagttatttaaaacttattgcaattgccactctttcagcaactgatcatgaacaccctgtgacatctattataatgcaaactgttacttaaatcttcaatgacctgtacctatttagtgtccccaattagcacattacctccttgaggagtgggagggactgtatcaaccacgtaacatggcacagtacaaaggatcaaggtaatggttactgatggagccggtgggagatggggaccaaactttgaggtaggtgacctctgacctcccctctgcacaggcactcaccccaggtgctccactgctctgggcctgccctccctggctcagtgccctcatggtatccccaaccccacccccccatcttagcactcaaaatttgttactattttgaacatcctctacccctaaagcaacttccctgtccagtttctttcctactccaagtgtgaaactagctaaaccaattaacctgtgctgatacagttatgggagagggctagaggagaacctcaggagacaggttcattttaaccagagtcatgtggcagtaagtctctgccttttcttggtttaatggagtcaggagtcaagagatgaccctcatctcccagcagctgatatgttactccctcctctgggttcccacagcactttgttttctttatttttttga

SEQ ID NO: 138944 - DNA, 1058 bp, Homo sapiens
tgtgaccacatctgggagccttctgacaagatcccccaccccagcccctttctccccattcaaccctacttccctcattaagatggagccccatgacatataagcaaaggggtcagggcaagtgtgacccaccaggcaaaattgagcagcattttcatagggaccgacttcagtagcacacctgcccctgcatttcagtgggatgtcaatacacttgaccccaagtcccccggccctgcctggtgtcactgtggccaaacagtgcccagcttaagcatccctggcatcagactatggccttcaagagcactagggcatatgcttttggcagcataacgggctgacttggtgatggagggaaaaagccttgagccaggcagaagtttgtggccagggtttgtgcagcagctttgtgagaagagcccttctacctggctctatctcactggctgcattccctacacagggaatttactaccctatatgtgaatatccctgtatgtacttgtgtgtacttgttggtctgtatcttagtttctttggggaggacagggctgtagctgtgaggtcttgtctccaagggtgtgtgtatgtctccgtggatcagccacagggatagggattttgtttttaagggaaagcattctctaattccctttgttcatgccgagattcagttgctctgagactatggggtacaagtttgatcctccgaatctggagatgttgtagagctggaacgagtgcagagtaggaacgctttgatgcgcatgcacattggggaagatgcgctcctcagggacacaaaggccgagtggggtaaaaccacgaagggagggaagggaagtcagctctgggagcagccctcactggctggaccaaggtactcttcctggagtttgccgtgttagcaaccacagtcaccttgcagtcaggctggaatcttgggccaccccaaagtgctttgctgaaggatttagacggggatgaagtgccctccagcctcagagctagccacaaagcccccagagctgaattcattgagtatttgtgcctag

SEQ ID NO: 138945 - DNA, 1052 bp, Homo sapiens
aaactactgaaaattgtattctagagacctagaaggacagttaaaatttcttggaagtatgacttttgatcttaaatgtgaatgttgcaatctactgcctcgagtacattttaagtgatttatcagtgaacaaaatggaggcccctggaagatgagcccagtctggactgtggctttgacgcctagtctggggcttggtcagctttggcatgcaggccctgtctctgtagggcctgcctgcaggtgggtcagaggttgaactttcagaaatgtagcctaaagtgctggaagggaaatctgtcaccctcagcatcttcatttgcttccagtctccgtccctgtctccctttgtgattcaaacacatttgatggaaaaatctaggcccttctgtcctgggggataatcttttagctcgctcagtggttaggtctggcctcatcctagcctttgggtgggtgcatagatcccagggtgggatggacacagacagcttgggacccatgaggctcagaagcctgggtatggattggccaagattgtgcccaaggacttcccagcctcatctcctccatcacagtcagcctgcagcccctcattcagccccacctttagcttagagtgtttacagtgctctccagtaaaaaacaaatatatctgcccggacttgcagtgcctttcagcctagagctacccaccgtcatctctgggtggctaagtacagaagagccgaggaggcactccaggtcaaagttagcttccttagcagcaccacgtctcattcctgtctccatagcctgcagatagagaaggtacaatttaaaaagaacgcatgccctctccagcttgagcaagctgcataaagcactatgaatattcaggtttcgctctggcaggcagggccccaggcactgcgggcctgtgccaggcagcaatccttcgtccacaccccctgcctgcccatggctcaggggggctccaggctgcgggagcctgtagtgacgaaagagcaggtagggccctgggcaggctgtctgggccaggcagggcgggg

SEQ ID NO: 138946 - DNA, 1010 bp, Homo sapiens
ctcagtcccttggtccccacccctcagttagaactgctaggctttgggggatgggagggtggcaattattcttaacctcccgaaattcctgatgacccgataacaaggaggtatttagacatagaatgaggagctaatctttttcctataatgccccctgaggataacagaggctagttcagctctgctaattctatgagaatctatgcacagaaaacacctgtctcattagatgaccacttctaattagccattctaataagtgtgcagtggtatctcattgtgattttaatttgtattttcctgatgatgtttgtattgactgatgatgttgaacatcttttcatatagttgctgtccatatgtcttctttgttgaggtgtctgttcaaatcttttgcccatttttaaactgaattgtttgttttcttgtagttgagttgtgagagttctttatattttttggatacaagactttcatcagatacatgctttgtaaatactttctcgtagtctgtggcttcttttaatccccttctcagtgtcttttgactttagcaaacattttaaattttgatgaaagtgcaacttttcaacttttctttttatgggtcatagttttggtgctgtatcgaagaactcttcccctagccttagttcacaaatattttgtctcatattttcttttataggttttataatattagtctttacattttagtctatggtctgctttgagttaatttttctgtatgttgagtggtatggatccaaattcttttccttccttccttccttccttccttcctccctcccttccttccttcctccctccctccttctctctctttctttctttctttctttctttctttctttctttctctctctctctctctctctctctctctctctcatctttatcttgctttcttgctttcttctttctttctttttcttggtcttgctctgttgcccaggctggagtgcagtggtatgattatggttcat

SEQ ID NO: 138947 - DNA, 1043 bp, Homo sapiens
tgctctgtcgcccaggctggagtgcagtggtgtgatcttggctcactgcaacctccatctcccgggttcaagcaattctcctgcctcagcctcctaagtagctgggattacaagcacctaccaccatgcccagctaattttcttttttttttgtattttttagtaaagacggggtttcaccatgttggccagcctggtctcgaacccctgacctcaggtgatccacctgtcttggcctcccaaagtgctgggattacaggcatgagccaccgcacccagccgagttgccaccttcttgatgggtcattttcttggcccagtgtgggcacttcctgcctctcagaacacctgactctcctgaagcttcctttcctcttccagtgtgacccaatatccttcccaatacatgttattgtctagaggaggaagagcacaggctctctacatttatatgccaaacttactggctgtgtgactatttgctgttgagctagttacttaaccactctgggagtcagcgcccatctcacagggttggagtgaagcttaaatgagacgatgcatataaagcactcagcagagtgcctggcatatagtacccacccagtaagtgttcactgctgttattattattcctgtgacagttattattattgttgtcaccatttccccttcacacacccttgactttgccaggctctagggaccaactacttcttcggcaatgcgggcagggcatgccacacccatttctgaaactaagcgggagattttccaggtttttctgctttttgttaactcggccattgcacaggatagggaaaggatgtaatagaaggtgtgtgtgtgtgtgtgtgtgtgtgtgtgtgtgtgtgtgtgtaatatactgaatggcaggcagtgctgtagtgaagagcaaaactcaaatcgttaatatttgtactaacattgccttctttagtccttcaccattttcatcttgagcatcattcactgcagaaataagagtaagttagtttctttgagaggcctaacgttgtact

SEQ ID NO: 138948 - DNA, 1050 bp, Homo sapiens
tggtttctgcatgagctacaggtggcaatcttgcaggatgtcatttgttgggttccagggcaggatggcatttcttagggacaccccccaaacatccctatagccccctgcagtggaaggggtcatgtctgccatgccccctgtctccccaggatctcccaccgagctgggaaaggccctgggcagccttctgtcctcagggtagggcctgaccccaacccgggcttggcatctctcctggatttctaagctgcaaagaggtttctggcttctcttccaatttattctttttgtggttctcagactgaaaactacttctgcaggggagaaaggaaactcctgcaaggcacccagaatcccataggcgctttcctaggggtcaggggcttttctcatcaacaccaacctgcctgcaaatctctggccgctgagcctcgtgtgtcctgtaatagcagccacactgctaatgccctgtagctcgggccccagtgctggttgccaagaaactgctggtcggggtgcttatgagggttctgacctcataggggctgctgagtttcaattcaacagacatttattaatacctactgtgtgcccaaccgatgctaggcgccgtgggggagatgagagaaggaggcgctggggaagagatgactaagacactgaaacaatcagaggcgaggacaagcagccgggccagtggctggtcaggtgctaattgtgcttgttggagcagaggccagcacggctgggactggaggtcagcagcagctggaggagggagggaaggctttgtgagggatgcgggcctaggctagaccttgaaggggggagagggggaagcaagggggagatttggctcagcagaaaaggaagaaaagacgcctttctctctattccctggccacgaactgaccttcgaagcctggatgattgtttggcaaatgtgtgtcacataaaagaccaggtcagctagtgtgggtggctcagtgcaaacccctgtctccactccgggagatataaactggctggccagcctgccacccaagc

SEQ ID NO: 138949 - DNA, 1053 bp, Homo sapiens
tttggtttttgttttttaattcagggtctcactttgtcacccaggctggagtgcagtggcacagtcacagctcactgtaatcttgaactccttacctccagttctttttttttttttgagatggagtttcactcttgttgcccaggctggagtgcaatggcacgatcttggctcgccgcaacctccgcctcccaggttcaagtgattctcctgcctcagcctcccgagtagctgggattacaggcatgtaccaccacgcccggctaattttgtatttttggtagagacggggtttctccgtgttggtcaggctggcctcgaactcctgacctcaggtgatccacccgcctccgcctcccaaagtgctggattataggcgtgagccactgtgcccagctacctccagttcttaaagcctggctgtctaggttgaaatcccagcattgttatttactagctatgtgatcccagtcaattgtatgccccagtttccttatctgtcacatgagaccactttataacactttggtgaggatcaaatacatgaatgaatacatataagatgcttattagaacagcacatggcacacagtaagtgctagctgcccttacgatattgcctaatgcagcgcctaaaactcagattcaattcagcaaacacttgctcagagccggtcctagtaccagaccccaatgaagtggcagtgaggaaaacatggatgtgaggaagacaccacctgccttccgggattgtgtgtaccttttcgtgtgggctggagtcagagcaggtgtacaggaaggggtcagggagaggggatatgtcatctatataaataattgtaattggaagccaggatcaaattcctgagccagtgtgggggatcaagcaccctagacttgggggcttctctttgcctgaagaccctggccagattctggtctagatgcacctcccaccctccccacacacagagtcttgccctaggatttgggtgaatgagagggaaaggaacactggttttcttttcttttcttttcttttctttttgagat

SEQ ID NO: 138950 - DNA, 1074 bp, Homo sapiens
gagtgagacagagtccgaggcctcagaaattactattcctcccagcaccccggcagttccacaggctcccgtccagggggaggactacggcaaaggtgtcatcttctacctcagggacaaagtggtcgtggggattgtgctatggaacatctttaaccgaatgccaatagcaaggaaggtaggtgcctgtcataactcttagaggaagatgggaagtacggcttagaaacattcctgtaacttcatcgggtgccctgagatgcattgtcccccggccaggtcaaattgtgcctgagcagaacaaaggtatagccttggctcaggaacattctttttcacttgggacttggctgggtgacctgggagttggcaggctgcttgtttggggttagtagagaactgttcccacaactccctcccagtgtgatatggggactgccccaggtagccccattgtgtgggcatggcctgaacgcaatggagtaagttagggacctattgttactctctctccctcagatcattaaggacggtgagcagcatgaagatctcaatgaagtagccaaactattcaacattcatgaagactgaagccccacagtggaattggcaaacccactgcagcccctgagaggaggtcgaatgggtaaaggagcatttttttattcagcagactttctctgtgtatgagtgtgaatgatcaagtcctttgtgaatattttcaactatgtaggtaaattcttaatgttcacatagtgaaataaattctgattcttctaaattaaattctgttctcttgtcaagggggcaggtgggtgaaggtggaaagccacgcatattagaaagcaagcaaattgcagcaccgaccaagcacaggatttttctcagccatgtattcatgccctactccagacgcaaaactcctttcatttccgaacttccctcacccctccagacctctttgcacacacctgctgtggcctcggcccacaacacttgactcccctcctctcctctcaggaagttcactatctctgaagactttcccagccttccaagcctcatccttgtgta

SEQ ID NO: 138951 - DNA, 1020 bp, Homo sapiens
tccctagatgctctagcaacagcagatcagttggcatctctcgtgatctgcatactaagttctttggttggcataagagtgcggtgttggtcgggtgcggtggctcacatctgtaatccctgcactttgggaggccaaggcgggcagattacttgaggtcaggagttcaagaccagcctggccaacatggtaaaaccccgtctctactaaaaatacaaaaattagccagggtggtagtgggtgcctgtaatcccagctactcaggaggctgaggctggagaatcacttgaacccaggagggagaggttgcaatgaactgagttcgcacccattgcactccagcctgggcaacgagtgaaactccgtctcaaaaaaaaaaaaatgcagtgtcatggagaatatgtgctaccgtgtcattccttacagtcccttgacagaacaccctcttctctcttcttaggagtgatttgggccccgatgttggctatgaagctattggtcttgtggacagtagtttgcccacagttggtgtttttgcaaaagcaactgcacaagacaaccccaaatctgccacagagcagtcaggtaagaaagtcctagcactcctcttggagagtgttgagaagcagtggtccagattctcctgaacaaggggtttctgtattggccagaggggcttgtcagtgaaagcctctcttcatgttgtgctttaaaagaaaccaaaccccaagtcctcactctttagtggtctgagatttggcaaaatcaggtatcctggtcaaagcatagattcaaatattgtgggtatctgtcctagacagtggacagtggctagctcaatgacactgctgttttgtgtgtctctgggaagacctttctaaggaagaaaacaagaaaacctgaactttttagattgcgtttttatttttctttctttcagttgtcatttttattattttgcttcaggcgaatctcaagaacacggcctgataggcttagcttaagactggctatcctcca

SEQ ID NO: 138952 - DNA, 2082 bp, Homo sapiens
attctgctcttttccacttaacaccataaatgtaagcattttctatgttgcttcagactttgtaaacagtttaatgactatatattccattaagcgaatttcacagtttacggttgctcactcgttggatttttaggttgctttgggggagtctaaatagccacaaagatgaacaaagggttagagagctcaaatgccacatccttcatgaagctggtccagttcacccccggctggaggttctcgccctctgcttgaaatacttgactcctttaatctgtacctctcatatggcacactactgtttacattgctctgtagttgtgagcaaggctgtatctttctgtactaggttgtatgctcctcatagtcaaggtccatgtcagttttgtctcagcaacccggacaacataatacttttgtatataataagtactccataaatatttgtcgaatgaatgaatactgagtgacaaaaagaaatctaagaaaacatttctaggtgagaggcagtcacatccaaaaactggtttctacatatagaaaagaatattctgcaaatcatggttattaaatatcctgtctgttaaggaaagaacaggaagtagacataagtaaacaaaactatagaagatttaggttagctttatggaagcagaatagatttttttttctttttttttttgaggcggtgtctcgctctgtttcccagtctggagttcagtggcacgatctcagctcactgcaacctccgcctcctgggttcaagccattctcctgtctcagcctcccaagtagctgggattacaggcgcttgccaccacacacgcctaattttttgtatttttagtagagatggggtttcaccatattggccaggcttgtctcgaactccttgtgatccacccaccttggtctcccaaagtgctgggattacgggcatttgccactgcacctggcctggaatagatgttttaaaatgagatctcaggccaggcgtggtgactcatgcctgtaatcccagcactttggaaggctgaggcaggcacattgcttgagcccaggagttcaaaaccagcctgcgcaacatggcaacaccccatctctaccaaaaaaaaaaaaaaaatttagccaggcatggtggtgcattcctgtagtcccagctacttgggaggctgaggcgggaggatcatctgagcctggaggtccaggctgtggtgagccatgatcgcaccactgcactccagcccaggcaatagagtgagaccctgtctaaaagaaaaaaaaaaaatttaaatgggttatcagctgtttttgttagtttaagtacaactctggcctgtagatggaaaacatgaattagttaccattacaagtgttctttgagcccccaaagtttatattttgtctttaacttgctttttttttttttatcatgtgttcatgttatgtatttgtttccacaggcaggagatgctgcatgcttctacgatataaagttgggaaggaggcgggtagagcaccatgatcacgctgttgtgagtggaagattggctggagaaaatatgactggagctgctaagccgtactggcatcagtcaatgttctggtaatagtggtgtgccttggagacccaactgattacaactcagtatctctaggaccataacacagagttatggtttggttttattatgagccagttagcttcatacagaagggaaaaaagtccatcttatgtccacacattctaccctcaggtagccatctggcagaagtgtcctgtttagtttttcaccaaactgatccttttgtaaaacattaaaagagaaaaaaattattttaagtgttctgtctggcgtatgttagactaggtgaatgaatggagatggcaccagcacttccggcaaaataggtcagaggccgaggtgggcggatcacgaggccaggagtttgagaccagcctgaccaacatggtgaaaccccgtctctactaaaaatacaaaaattagctggacgtggtggtgcatgcctgtaatcccagctactcggtaggctgaggcaggagaattgcttggaccc

SEQ ID NO: 138953 - DNA, 1999 bp, Homo sapiens
cccagcttgagagatctgtgagctccagttggaatgtttcatggcaactagttttcttaatgttctttttcagatatatgaaatcagggcatcttttcaggaggatgcttcctattcagaggttgcaaagcacttatgtaagccttaggtgactgcatgggtggaagtgcacagagttcaccatctgaagcttaatctggggccagcagttctgatacctgttgtatttgcgttacaaatgaacttgagcaccgaggccctcatgcccactgtcctgtaagtgggcgctcggcctggattgcagctctgccctgtctgtagtgagggctgcctgctgctcctttacttctcttcctgtattcctaggattgacttttgcttcctgctgtaactactctgtttcttcttcccagctcgagccttgggcacagaagtgattcaactcttccccgagaaaggaaatatgggaaagatcctccccgaatacctcagcaactggaccatggaaaaagtcagacgaggtagagagactgtttctatatgctgccactctatttcctttgagtgtgacctaaggcaaacttcgcttctataggaacccccttgacataagccctatcacctggcctgtaaaatgtttccaccattctccagtcagctaagttcatctaggtgttctgaatcagatgccccaaattcctggaagtgctgaaaatgaaccatgggtgtaggttcttgcagctctccaaaactgcctgtgtactgataattggttttaccgtggaggagaccgctggtcagctttcctacttcccatgaaagtgatagccttgtaggctcactctcaggtcttgtttgcctttacagagggggttaaggtgatgcccaatgctattgtgcaatccgttggagtcagcagtggcaagttacttatcaagctgaaagacggcaggaaggtaaggaaggaaaagatagtctgccaagaggccttccagttctccactccccttgcctcatttttactccttcatttgacaccagtagattagttttcctggcagttgccattaacctgatataattttccgaattaaccatccctccattaaaacagaatgatgagagccagagtaggctcctgtgaaccactttcccttagccccattctatctgtctcacagagttttgagtcctggctagggtggcagatttctgttcgaatgacatgggggatgtgcatgggatggggtggtggaggcttatgaaatagaacttaaaatccatttatcagaggtaagttaacccatgattttttaaagtcccaattcttaatggcatgaagggccattgttacgcctgtaggcataaatggaaactgtggtaattgactgaattatttcttttttgcctcaggtagaaactgaccacatagtggcagctgtgggcctggagcccaatgttgagttggccaagactggtggcctggaaatagactcagattttggtggcttccgggtaaatgcagagctacaagcacgctctaacatctgggtggtaagtgtgctacagcatgaccaggcataattcattctccctagcctgtgaacaagtctgcccggtggtgtgctaaagctcatcaacagcctaaccaaatagggtcagagtgtttggaggctgagggtacagaatagaaatgtgtgaactgcttgattcagaagaccaggtatggcctcatctgcaagctagtggcagatgaaatgaacagtgtgcatgcctgcaggggtagagctcttccggttctacttattggcagcagctactggcataacccctggtgggcatgcacataagccttcagatggatctgctgttccctttgctcaaacttgaatccggaggatggaggatgaagcaatgttataacctgttccctagaaaggaaaattactctgttttcattttccttgagtactatttttagctgttttttacaatctat

SEQ ID NO: 138954 - DNA, 1104 bp, Homo sapiens
accacgaccggctaattttttttttttttgtatttttagtagggacgttttaccctgttggccaggctgtgtactgtcttttaagttcttcctagaacaaggcttgtcagcctctgcagtattggcattttgagctggataattgtagtgggggctgtcttatgccattgtagtatgttagcagcatcctggcctctgcacactaaatgctgggagcacctacttgccctgacaaccaaaaatgtcttcagatattgccagatgtcctcctggggaagatagggacaaaactgccaccaattgagaaccactgtttatagaaggaattttaccatgaagaaataaatttgcattaataacatagaagttataattgagtcactttatacaaggagaaaatttacttttgccaaagatttagaagaaactactttctagtattattatcctatgccccttttggaaattaatggactaaactgatgtgatcctgcagattggagactttagaagcttggagaagatttcacgggaagtcaaatcaattacgattatcggtgggggcttccttggtagcgaactggcctgtgctcttggcagaaagggtgagtattgaggagtgaccttgattttctttctctagtcttatatagcttttctgtgaatcccagagatgtgtttggcaggatcagtaggaagagtttaattaaggtttatttatttatttttttttgagatggagtctcgctctgtcacccaggctggagtgcagtggcgcgatctcggctcactgcaagctccgcttcccgggttcaggccattctcctgcctcagcctcccgagtagctgggactacaggcgcctgtaaccacgcctggctaattttttgtatttttagtagagatggggtttcaccgtgttagccaggactgtctcgatctcctgacctggtgatccgcccaccttggcctcccaaagtgctgggattacaggcgtgagccaccacacccagcctaattaaggtttatatagtgaaaagctaaacactgagattagttctggtgagggatcccttggtgaccaaaaagctgtcacctgagcaac

SEQ ID NO: 138955 - DNA, 1052 bp, Homo sapiens
tttgagacagaatcttgctctgttgcccaggctggagtgcagtggcatgatctcggctcactgcaacctctgcctcccaggttcaagcgattctcctgcctcagcctccccagtagctgggaccacaggcatatgccgccacacctggccaatttttgtatttttagtagagacggggtttcgccatgttggccaggctggtctcaaactcgtggcctcagtgatctgcctgcctcagcctcccaaagtgttgggattacaggcatgagtcactgtgcctgtcctgggctgacaacttcttattgacctggagttttggggtggtgatggaaatgttctgaaatcagatagtggtgatggtggcacaaccttgtgaatatactgaaatccacagaattccacactttaaaatggtgaatttgatgtgaattatatctcaataaaactttttcaatgctaattcatctctacctcttttgtgtatgtgtgtgactgtaccaggtagtacagctggatgtgagagacaacatggtgaaacttaatgatggctctcaaataacctatgaaaagtgcttgattgcaacaggtgagcatttctggagatggctttcttccctgatacagctcattcaagttttagagtccagccttctctatggaaggcattactacttaagaaaatggaaacccagactctctgaagtgagtgtcttctcttggtacaaaagctggctgtgtcaaagcatcctggatcaccagcccttctggatgatccttgctgttctcccggtagaggcatgaagaagttgcccttttttctctccctgcttaaccctcaccctgtgccctgtgccttgaaagtgatgtcgtttgtggcttcattgccagttgcaatcagaaaccaagagaggagacagaagcaatttatcaaacccatgtagctatgctagctggcaaatcctcatgagaaactagaagagaacatggaagccaaaagtaaggccttttggccacctaggggcagggtgtaccccttgaagacagactctcaa

SEQ ID NO: 138956 - DNA, 1768 bp, Homo sapiens
ctcatagtaaaataatttgggcataactcagcacggaatatattgttagactttaaaaggtgagtgtctgagtaataaggtcagttattagcaggtatttgtggagtcccaggatggttttgttatattttattgttgttaatggcaggtactagagtgtgtgtgtaaactaatggcagtgttccaatagggacgcattctctgaaggagcaaagcccagagtagatgagatacacagcataagtggaaggattgtccttcgttaggaacatactcacttctcctgtaaggggacattagacagagaagatggatataggtttgttgataagccggtaatgagacatttagtgtcccctatgtgtaaacaacattcaggccctgccctctaggggctaactgtattaggcagaaacataaatacataatcataacacataggtgtgtagtaagagagatctgcgcagtatgttgtgggaaatactgggaagggtgcccagtagagtgatgacatcaggaaaggctttctggaggagaaggtcttacagaatgggcaatcttatggaatgaagaggcattcaccagactagagaagactgaagagcatccaagtaaaaaagaacagcataagcaaaagcacaagggcacaaaaaagcatgtttggtgccaggaaatagaagcagctcgatactgatagagcagttaggtacaagttaggaagtggcaagagatgaacctgagaagttatgcaaggggcctgattgtggagggctttgcgtgaaagagctttttctgcactggggagctgttgcattttaggcaattgaattttaaataatcaccattggccgtgaggaggatggatttcagtgagacaagactagagagagaccatttcagagattattgcaataatctaggcaagagatgatgagagcccaaattagaatagtagtggtatgatgatgatgaagaagaagaagaaagtaagaggtaaaatttgtatagtacctattctaatcttgtaagcacagttcttaaatgctttatgtgcaccatctcattttatcctcccaataatcttatgaggtaggtattatttccctcttacagagaaataagttgaaatttttaaaaataaataaattttaaataatttgcctaaactcacatagctagtaagtggtagagagagaatttgagcccgggtctgtctgagccacagaattggaacccagctattctgattccagagcctaagctattaataacatcagtgtacagtgtacagtactttttttttttgagacagattctcactctgtcgcccaggctggagtacggtggcatgatctcagctcgctgcaacctctgcctcccaggttcaagcgattctcctgcctcagcctcccaagtagctgcatgcgccaccatgcctggctattttttttttttgtctttttagtagagatggggttttaccatgtaggccaggttggtctcgaactcctgacctcaggtgatccacccacctcggcttcccaaagtgctgagattacaggcatgagccatcgtgtccagccagtattacttcttgatagaaaggtgatgagaagtagggaacacacttgaggcatgcttaggagtcatgcttgatgaggcttggtggttggttaaaggtagaagatgaaggagatggaggaggcaaagatgattttctaatttctagcctgcatgtctgagtggatggcagtgtacccacagctga

SEQ ID NO: 138957 - DNA, 1029 bp, Homo sapiens
tggagtgcagtggccgaatcatagctcactgcagcctcaaactcctgggctcaagtgatcctcccacctcagcctcccgagtagctaggactacaggtgcgtaccaccacgtgccttttattaattaaaaaaatttttttctagagacgagatgttgctatgttgcccaatctggtctcaaactcctggcctcaagtgatcctcccaacttgggctcccaaagcactggggttatagacctgagccactgcactcagccaatattaatatattaactaattaatattaatatatcatagttgataactgcttgaggcagagtcttctcaggagctataattagttgttccattgaagagcaccattctggacaacccatttgggtggatatgtgaataccagctctttgggtgctccacttgttcttactttgaaatgaacctaaatctagagcaggatcctcagcctcagcactattgacatttggagcaggataacgctttgctgggggtggggagctgtccagtgcatcataggatgtttagcagcatccctggccattacccactggatatgagtagcatccctacccaagttattacaacccagattgtctctggacactggcaaacatcccctgggagcaaaattgccccaagttgagaaccactgatctggatacctgtatgtaagcaagtcatgaccatgatttaatagacttggagacttactttggaaaacgtcccttaaagtttctgataatggaaacagttttattaaagctacgggggaagctgataacagttccacatgcttataatattctccctctcttctccatacagcatatatttccagccaccttctttctatgtctctgctcaggacctgcctcatattgagaatggtggtgtggctgtcctcactgggaagaaggtgagctagtagaccgcttcttttgtcaggctctacgtacttgcccaccagccagtatggtgatgtgtgtttccattaccatttatgtctgtc

SEQ ID NO: 138958 - DNA, 1049 bp, Homo sapiens
tatagattagccctttctagcactttattcttctagtataaaatgattttttcttttttcttaaactgtaccttcagaataaaatatggggagaattctttatagagagcctaaaaatctgaaactggaatattttcatctgcttacacatattttttccataccaagcatgtgcacacccagtattttttatttcttaagaaaacaactttgtcttagtggttttgacatagaggaactaacatcagatagacaaaagcttctcatttaattgaaagataatattacttacagtatgagctagctgtatggtgaaataaactttctccatgtttggatccgcaggcctacaagactatgaaagaggatgaaaaaagatacaatgaaagaatttcagggttagggctgacaccagaacagaaacagaaaaaggccgcgttatctggtgagtattcccttaagtcttgctatgatttgagactcacaaagggaaagttataaacagtttgggtgctgtgatttatggatgtcttgtagaagcaatggtggtatgagattgcaagcatctagaaagtatggtattaccctagaactgggagtgatttaaagcatttggctgaaatttgggtttgagaataaagctagtgataattatgattggttgtttatctgtatattaatattagtctcttggctgggcacggtggctcacgcctgtcatcccagcactttgtgaggccgagatgtgcgggtcagctgaggtcaggagctcaagaccagcctggccaacatggtaaaaccccatctatactaaaaatacaaaaattagccaggcgtggtggtgcacgcctgtaatccctggtgctcgggaggctgaggcatgagaatctcttgaactgaagtggcggaggttgcagtgagccaagatcacgctgctgcactccagcttgggtgacagagcaagactctgtctaaaaaaaaaaaaaaaaaagtctcttaaaaggcaagcttagcaaggaaaactattggaaaagatggaaaagagatga

SEQ ID NO: 138959 - DNA, 1756 bp, Homo sapiens
cagctaatttttaacggggtttcaccatgttggccaggatggtctcgatctcttgacctcgtgatctgcccacctaggcctcccaaagtgctgggattacaggcgtgagccaccacgcctgacctacattttttaaacggctgaaaaaaaaaagaatttcgtgacacatgaaaattatataaaatttaaacttcagtgtccataaagttttattggaacatggccacatccattcatttatgtattgtctttggctgcttttatgcagcatcagtggaattgagtagttgcagcagacaccaaatggcccagaaagctgaaaatatttaccatctggttctttgcagaaaaaatttgctgctctaggttgatagtcaacaaacacgaggagtaatcacagaataatcagagactgagaccttcctttatctgaaaatgtcagcgtctccctagaaaaagaaatctacagaactcttatatttctatgtacaggtgctgttatgatcatcacatcattacatagctctgcatagttttacgtcaaaataacctttgtattattttggaggagtaagagtcaaggagttgctggacacttcacattttgtcattataaaaaatatttcatagtccaaaattttttagttctttgggggagagaaactcattaaaatttttttttctgattttcttctgagctttaacatttctgtattccaggacacattacctttcatgcaagattgaactgtgtcctggttagagtgttgcgttttattttgtgcaagattggaaccatctagattactccttaaatggttgttataatgtcccaggtagcccatggttaactttgtatatctacctattcagtcatctctctgtgtttacttaatttatgggaaagacatgaaggaagaggtatttgatgaactgttcgtgtttttcatgatcttttctggaagctgaaaattttctcactggacagcattaaattttactcttaaaaacttcagcaacttaagagcgttcattcagctgtctgtagtatttatatatgcagttttgatgatatttttcttgatcatttaacggtgaatatctgtgggcaataagtcttgtacagtgcattgacatttaatcataaatatgtattaactattttatttttgtatgtgtgtgtcttaataaattatgtttcttaggcaacttgttccagcgatggcatgttcctctagaactccagatgacaagacaaatggctagctctggtgcatcagggggcaaaatcgataattctgtgttagtccttattgtgggcttatcaacagtaggagctggtgcctatgtaagtagaaaagcagcgtgtataaagaagctgccaaacagctcccattaatagactcgatagtattctgctttaaaacttttgcaactaattcccctttctccttttggaaaaattttcaaaaagccttctcttaagtgcctgctgcctaatatcttatgggagccaattctggaatgactgaaatttaatctcatgttgattgatttctgctcttttcacttgtctttttcttctttacttgaaagccactatgttttcctagattcgagtaacccacaaaattgtacctgttttcttggatgtcacacactaacctgtgaataaagtcaaaatccattgcagctccttagcacaatatttgattttgacctatttgtcagacattttatttcctcagcttgaggt

SEQ ID NO: 138960 - DNA, 2281 bp, Homo sapiens
tggtgtcctaaaaccaaaaaacaaagtgcgatgccggggctacgctgttgtgagatgctgttatcagttctcgtcaccaacacagcggcagcaccaggcacaaccgccaatcaaagcggccccacgagtccctccttgaacaggttccttaactcgttcagtccaacactgtgccacaaactcgcgaaaaccggctacctagagccagcgtctttgcgagcttgcggccagctagtgcatgcgcaaatcctctcgccgtgcggaccaatcgcaatgcggcagcgagtgctacgcctgcgcagtaggcctccggtcgccgttccccttccccggctctagcaggccggcttctctgtccaatgcccacccggagctgggaggaggagtctgcgtaatgtgcgtgtgaagagactgggggagctggccggggctcacggtgtttgacccgtcggtcgtgcgtgagaggaaagggaaggaggaggtcccgaatagcggtcgccgaaatgttccggtgtggaggcctggcggcgggtgctttgaagcagaagctggtgcccttggtgcggaccgtgtgcgtccgaagcccgaggcagaggaaccggctcccaggtgactgacccattccaggcaacctccaagtccgagggcctggcgccttaggctccctgtgccttgcagccctctacccccgcgtccccgcgagaaacttaacacatagtcacgtgaattccaaattggcagactccgaaccctgagtcttgcaagcggaggaattggctcagccatgccgacctgaccttcaagagatttgaacccagtagtcggcttgaggccttttcccgggagcgtttgctgttcagggatcccagaacaactggctgtcggcgcctccccggcatccccaccccccacccccctttttagagcaatgaggtcaagtagactttgtcatttaccgattgagactttaaacaggacgtttaagccctacgcctaagtttcttgtgtaaatgagggtgttatctgctcagccttccaaaccacagatgagatccatggatttgaatgcccagtgaaacagaaacggtgcagggcaagtaaggagtcggttggttgtgtaccagacacccagagaattggcccagacttaattggagatgcctgagccgtgtacttcttggtggtctttaaggcttcaaagaaacagtttgcagaacgcattgtattttgttctccattaagttgtttcatcaaattttagagctggaagggattttgtggtaaaggtcaacccactcattttatagataataaactgaggcacagagaggtgaaattacttgccaaaggtcacatagttaattaataggtagagctaaggatagtttgctagcctccaggtccttaatcccttcgctgcaactccatactgcttcctaaagttgacctcaaaaagttaagaatgaattcgggtctcttcccagtaattagcccattgtacatcagatatccgtgaatttatctgagcatggcttgagcctgcttcttttcgtactgcgttacttcatgggggcaatgaatgatccacctgtaggagttgctttgaaaaaaaaatcagtaatccttcaatgtccacccctagggcatttgcaatgtcagaagttatccttgaggcttttacaatacagaaacacctgggtgctttaaaaataaaaagtggaaaatattttccttgggttgttagggtctttgcaaatgtgcatttgaacagtttttccagttgctatgcacaatgaaaatgtttcctgataggtgtatttgagttatgtcctgggacatactgctcttggaacttaaaacctctgcttagcttttaaactaatgccttatcaatggatgtcatctttgagggttttgtgtattgaaatgatggtgctctgtgcttgttgcacagaaattgagataacctgaattttttttttttttttttttgagacggagtctcgctttgtcgcccaggctggagtgcagtggcgcgatctcggctcactgcaatctccgcctcccggattcacgccattcttctgcctcagcctccagagtagctgggactacaggcacccgccaccacgcccggctaatttttttttttttttttttgtatttttagtagagacaaggtttcaccatgttaaccaggatggtctcgatctcctgacctcgtgatccgcccacctcggcctcccaaagcgctgggattacaggcgtgagccaccgcgcc

SEQ ID NO: 138961 - DNA, 1048 bp, Homo sapiens
ggcacggtggctcatgcctgtaatctcagcactttgggaggccaaggcgggaggatcacaaggtcaggagttcaagaccagcctggccaacatggtgaaaccctgtctctactaaaaaaaaaaaatacaaaaattagctgggcatggtggcgtgtgcctgtaatcccagcttcttgtgaggctgaggctggagaattgcttgaacctgggaggcggaggttacagtgagccgaggtggcgccactgcactccagcctgggcaacagagcacgactccatctcaaaaaaaaaaaaaaaaaaaaaactcataagtcaaaccattgtaactcgaggaccatctgtatattatatatgtataacgtttggctctggcgtgacagagtagacaatgaataaacaatgctgatgttactgctactcctgctgctgcttcagctgttattgctgttaattctgttactgctgttactatcactactgctgagaccctggaaacaacacatcagtggaatcttctctgacagttttagtggcaatccatcaacattgtggttattcataactttggcttataattcccaggtcttgaagtacattccttcaaactgtcgggtggatgacatcttatcacagtgcttcaattacatgtggcataattctctaatgtcggaaatgagcgtagctctggctttttctgtctaaggactacgaaatgacactgccttattgaaaactactacggaatcctgtctgctctggagggaagcattccttttgtgctaaagaaccccttctttaaaagaaacttctttattcattattaccagtaattcacttccagaaataaaggaatcttgaatcaatgaaatcttgggtacttattcaatacaattaattatatgaaaacgtaatttttttttcttttttttttttttttttgagacagggtgttgctctgtcacccaggctggagtgcagtggcacgatctcggctcactgcaacctctgcctcccgggttcatgcgagtctcctgccgcaacctcctga

SEQ ID NO: 138962 - DNA, 1046 bp, Homo sapiens
gcctgccaccacgcccggctaatttttaattttttgtatttttagtagagacagggtttcaccatgttagccaggatggtctcgatctcctgacgtcgtgatcagtccgcctcgtcctcccaaagtgctgggattacaggtgtgagccactgcacccgaccgatactcacatttttaaactttttttttaattttattttggtagctaggttttatattgttcttaaatttattttactctattttatttttccatcacttctttgtcccagattcatgaaatttgctgatgtccattttatgtctacttttgaactcttctctttgtgtttgttttgttcttattacaaactccaagacatttcttagaattgtctacagatttcgtgtagctacttattggtagcttcttaatttcatacttgtccagaccattagacattattacatgctctgtcttgggcctatcattaacattagcttagggattctgatttcaaagacataaagaattggcaaaactcttcttacagaacttaaaacaagttttaaagttacatttctatacatctaatacataataccttcttagccattaatgtaattcctctggataaagataatatattcaaaaaatattgggaccaaaaaatgcacttgtttcttgctcatatatatatagatgtatattttttttaatttcttgtttgtttattttggttacattgaatacagatttgctgaacagttttgatgttatttttttaataaaatttgtattgttaaagtgccttggaaatttctaataaataacttcatataaaagctatcatataactataggagcattgctttgctcctagttccgtggagcctgattgcttgacctgcagactgaaagctttatctgctgagcacatcttgtactttttcctccagcacagttaaaagcaaactatttacactttactaatttcttgagcagctagcaaaagccccctttgtgatcttaatagtcatgaaggtgggcaggctctgaagtcatt

SEQ ID NO: 138963 - DNA, 1149 bp, Homo sapiens
cccatgtattaaattgatagtctcactcttcatatatgctattgtaaatgtaaaactcttttgatttcagtttccaaaagtacctcaacttctgaacccactactgggtaagtttaattttccttcagtgcattttgctttgatggactttagcactgttgtattttttaatgaatcattaatattaatataaatgaaaaatattaaagtttttttttttttttcttaaagctgctcattgaaatagattcctgctccatggagttcatgcaacctggtgcaagacaagttggaagttcctaagttcaaagttctgaagtattttctcacacaaagggcagttaaacagccaagtttatgacactagctctcattattcagctcttttcagctttcagatgccactacattgttattccaccttatctttgcgtcaggttaacatatcttaacatatttttttctccagttggctctctccaaaaatgccttttgtttttctctgctatacttgacttgccttcagaatattacattccagataatatgactgttcatctttttctgtctgttttgtctgctttcttaatttcttataagtcttacatgtttaggtcagataaccattttttcttcattccttgttcattactgttctatttttcatatttttcaaatgaagaagcaacacataagtttcaaaaaatatccagggtactcctggacagtgtccccttttgatggacacaactgatacctgttctttctttccaagaaatgtgaattatttgactgtgagacgtcctctagtttgtggccttcagaaatcagatcttggggagagtcccttcctacctgactgacctcccataaggctgatgctgatttggccagagatgacctcaaggcccaccaaatagagcacaacttcccattgggagctttggcttttgatcttaagcttatgggtcgattctaaccaagaaaagtccatgagatcagtgcttcaacatccaggttgacgtttaaccattttggctgctgctctttaattttcctctagcaggcatgcagtccaaggaatatcaaaattctgattgtatgggaaccaaggttactttcttgttcttggataaagaaaatttctac

SEQ ID NO: 138964 - DNA, 1507 bp, Homo sapiens
atatgaggtaagggttcaaattcattcttttgcacatggatatcagtttttgtagcagcattcatcaagactattttttgccccattggaaatgttttgggacccttgccagtttaccgtaaatgtgatatttacggcttacaatgatatttttaatactaatgcgatggttacttttctaaaaatatgtattggctttgtttttataggttactattcgagcttcacttggacctctccagtcaaaattaccaactgcacctttcggttgcgctccaggcacttcttttcttcaggtcacacctccgacatctcaaaatacaactgctagaaatcctagaaaatctaatgccagtagatctaagacaagtaagcttcatgcaactacatccactgcaagtaaagttaatacaagtaagccaaggggacgtatagctaagtccaaagcaaaaccctcttacaagcaaaagcgacagcgcaacagaaaaaataaaatgagccttgctttgaagaacataaggtaatatcttttattcctgatatacaatacaaatttaatcttatgtatataatttatcatatcataaaaccctcttacacatttacatgataatcacttatctggcataaagaccaagcaaatgagaaaaaggtactttttacaactgctgagcagaacttgagtcattgtgtttattctctaattttcatcttttacactaaacttatattttgtgcttttatcttatgatagattaattggtttatttgatcccttttattccagggaaatgttaactggtgttaaattttttacacttactctagcttgtttcaaagcaaattttgaaattatgagtctacttaaagataccaatttaaacattttggcttcagttaataaaatgttaataagattttcccctgttatttttgttttataatctctttttatcttttttttccgtctccataaggtgtcgtcggggaattcacaagtgcattgaatgtcattccaaaataaaagattttgcaagccacttttctatatacatccactgcagtttttgcaagtacaatactaactgtaacaaagcctttgtaaatcatatgatgaggtaagttaaacatgtaaactgccaatcagaatttccatttgggtcatttgttttttgaaaacagagttatcctattgaaagcaagtttgtctcatcaaggaactaaaagggtctagcaatagggaacttctaagatgttccttgtactattttccagcatagtaactcataaaattactgggacaaaaactctgagaacaattagactaatgaaattaaaatgagtttgttagggaaatttgttttttctatgggacttttttttcttttatgtctttcaaaaagtggttattttttaacataaaatgttaagtgttttcaatatatttatcaaataaatatgatcagctcttgcattccacatctgtggattcaaccaactgtagata

SEQ ID NO: 138965 - DNA, 1113 bp, Homo sapiens
tcgttaatatctgttaacatacaactgttatcaatataaaactaatattacaacagtaagtaaatatcaagataaatttcatttaatcagtatgaccatttagaataagtagaaggcttatctgattgtagtttatacttgccattttcaaaataatgattttaactttttgtattgcagtggttttttggtaacagtgttattgagatataattcatatatcacacaatttacccatttacagtgtacacagttcagtggtttttagtatattcagatttgggcaaacatcactacaataaattttaaaacatttttatcaccctcaaaagaaacctcataccctttagcattcactatttcccctccattagacctgtgcaaactttagtctgcttttagtgtctatggattttcctattctggacgtttcatataaattgagtcatacaatatgccatctttagggactggtttctttcgcttagcataatgttttgtaggttcattgatattgtaccatgtttcagtacttcattcttttttgtggctgagtaatactccactgtatagatattctacattttatcctttcatctattggtgggcatatgggttgtttcctctttttggctataatggtgctgtaaaaattcatgtacaggtttttgtgtgaacgtatgttttcatttctcatgggtatatacctctgagtagaatggctgagtcaaatggtaactcttacctttaatattttaagaaactgccaaactgtttttctttttttgttcttttgttttgttttgtttttgagacggagtcttgccgtgttgcccaggctggagtgcagtggtgcgatcttggcacactgcaacctccgcctcctgggttcaagcaattttcctgcctcagcctcccgagtagctgggattacaggtacctgccaccatgcctggctaattttttgtatttttaaaagaaatggagtttcaccatgttggccaggctggtctcaaactccttacctcaagtgatccgcccacctcggcctcccaaagttcagggagtacaggcctaagccaccacacccagcctgccaaactgtttttcatt

SEQ ID NO: 138966 - DNA, 1003 bp, Homo sapiens
agctatgggcaagtgcaaatttctcttgggtcccatttcccattggtaaaataataatggggctaggtttgaggagggatttagtcaagggtttctcaaacaatagattgggatccactcgtatttatgcctctataatcagtatagaacttttccaattaaaatctaattatatactttttatgtttgatccttatatggtaactaatgcttttgaaactcaaatactaacacaaggagtacttttaaataatagatcactttgaattgtctgtggtgggagatggtaaaattctggttgtaaatttatttagattttagaattaagagcaatttcagctcctaggatttgtggtggtggaagttattatatctaatattttctgtaaacagaaaaaaggagttcatcgttgcccaaaatgcagactacaatttttgaccagcaaggagaaagctgaacataaggcgcagcatcgtacatttataaagcctaaagaactagaaggattgcctcctggagcaaaagtgagtttgtgagggagtttttggtggttttttgcacattctattaatttttttatgtttttttttttattatggatagaaggaataagatctagtgttagaaagctcactagggcaactatattaacaataatttattgtgtatttcaaaataactaaaagagtggaattggaatgtccctaacacaaataaatgataaatacttgaggtgatggatacccgttaccctgatttgatcattatgtattgtatgcttgtatcaaaatatcccatgcaccccaaaagtgagttttaaatatgctgtatttttaacattttgtatgataatagaaacaaactactgcctggttttatctattgaatataatattaaaattgacctctgattgttattaagactttaattttaggttttatcattcttatgcttgtaaagaaaaacttctaaccattgttttttttagttgattgatgtgg

SEQ ID NO: 138967 - DNA, 1033 bp, Homo sapiens
tatagaataccaaattaaatgctttgggatcagtgttccagaatttgaagtggcttccagtaacgaggaattgagatgaagataaattgacactggcatagcatggatgctatttaaaatctaaagaagagaatactctgttttatatagcaggaaaagctttttagaacaatatttggcagaggttgaaaattcacatcaagatagggggtggtagatttgaaaagaagaagagagtcttactgtgttttggaatatatgcctaaactttgaaagatatctttcaaaggttatctttattacttgcagtaatatgattcttggttgtataggcagcagagctggactagtagtacatgttcttccaaacagatgacccgttattgctactttgattgtaattgcaagaagttataaaatatcaagttaaactaagccttctttatatttctaggtttgccagtttagatcatcaacattttctgatgtagaagctcattttagagcagcccatgaaaacactaagaacttgctatgtccattttgcctcaaagttagtaaaatggcaaccccctacatgaatcattacatgaagcatcaggtgagattaagcagttcttatttgttcatgttgtcttagtgaaaagatatagatctatatgtatagatctatagctacatctatatctatctataacgtagaacattggttagatttgttctggacagaaagcaaagttgttctgaatgacacaattaatttataatttatgctgaataacttgtgaaactttcacttattttccttgcttgctttctggtgacactgagaatcataaatagtcaaagttctgaaagatagctagaaataggaaccccaaagtggaggaaaaaacagaagattcatgaaatatttaggttagatatttcaggacctaagggtggtgggactgggaatgactttgaaggtgcttatcaagagcaggaaaaagaataagtttgaatggaggaacataagattaaggactcataa

SEQ ID NO: 138968 - DNA, 1050 bp, Homo sapiens
tgaaaccttcagagctttcaaagatttgtctcttcactgtagctgcttttggtggtagagtttccatcctttcagtattttattttaaaatgtaaatagtatttcatgtatggaaaagaagcctgctatttttctttgctaaaaaaaattttaaatctaaaataatgatatagtgttacagcaaattagtgatgtttcatactactacattaatggattattttagaaacaaagataaaaaaaccttactgagccacttaatgaaagtaaattatttaaagtacacactttatagagtgctttcaggccttggagatgttattttgagtcatagaattacattttaaaaatttattttcagagacttatttgtgaggtttttctttggttataagtctgaatttttgctcttactggcaaattgtttgtaggtttatgaaccacatgaaacatcacttggaacttgagaagcagaacaatgaaagctgggaaaaccacaccacctgccagcactgttaccggcaatatcccacacccttccaactgcagtgccacattgagagtacacacactccccatgagttttctagtaagtgaaagtttctttggaatcctgaatattgttgactttgatcatccgaactgtgaggaaaccttaaaaattctggcagaaaaaaataagaagtagactttgtaatatgagggcaaaattgaaaaaaaaaatcataacttttataaacctagatgaaatgtgttctaaagccaggtgtgatggtgcatgcctatacacccagctactgaggaggctgaggcaggaggatcacttgagcccatgagttcagtactatagaatgctatgatcaattgcacctgtgaatagccactgcactccagcctgggcaacatagtaagaccctgcctctacaaaaaaaaaaaaaaaaaaaaaaagtagaagaaaaaaactgttaaaattgaagtcccttggtcgggcgcagtggctcattcctgtaatcccagcactctgggaagccgaggtgggttgatcacctg

SEQ ID NO: 138969 - DNA, 1055 bp, Homo sapiens
attcctaccagtggtgtataagcatgtaagctgtatcttgacacagatatgaaatgggtgattttgggccaagaaaaatattattattaaatatttacatctaaaaagaaaaattgcaaggaaaaaatattagatacataaacatcccctgatcttaaggttttcaatattgtttttgaagttattcctttattaagatagtaggtgtttattgtttgaatttttttagaatatgtaaaaatggaagccacaattttggtcagtatctttctagatacattgccaagcgtagttttatatcatctgaccttagatgtaaacacaatcattttttggtatctaatctttaaaagagctgtagacaaggctcatatttttttcctctttcagcattgttgtccagacatgataactaaatttttgggagtaattgttaaatcagaacgtccatgtgatgaagacaagactgattcagagacaggaaagttgatcatgttagtcaatgagttttattatggaaggcatgaaggagtcactgagaaagagccaaagacttacacaacctttaaatgcttcagttgctcgaaagttcttaaaaataatattaggtatgtaaatatttatttttatttctgtttgaaagttgggatatgacagataagaatatagtatctttacattgctctgccatcctcggtaattaattctaatactttctactaagaacagtggcagattatcatgttgaaaagcttttgttccttcttgtattttaagagtttgactccaggatccacctagttgttttgttttcagatagcttaagaaaagacaaaatgtattttaatttaggggaaaactacttattttccctacatttattactgaactagacggtttcatgaaaaacttatattttctagctgactttgaatcttacttttcttcatgtcacaagaagaaccctatgcagcatgacctcctccatactaaccttatttaaagctcaaatttttccattttaaaataaattgcaggcgtttaccaaaaccaaa

SEQ ID NO: 138970 - DNA, 1054 bp, Homo sapiens
tactgggaacattgttctttgtcattgggtatttcccaaaaacatgatgttatgtgatagtatcatttaatttatttagtcatttctttattgttatacatacaggttttcaatttttgctattataaatcattcttcattaaacattttcatttctttagcatagattcttagaaattgagtaattggaataattggaccaaagaatatgaactttttttaaaaagcccttgatatagatactgctaaaatttccttgcagaaaagttgttccaaaatataacctctactttgcctgtaatattatttttaaattttaacattttatttcaaactaattttagatttacagaaaaattacaaaaataatgcagagttcccatatactcctcacccagtagatgctaattttggcagagactaataattacctttgtgttttataccatattagtaattgagttattaagattctttatagtattgacatacagctaaatttatctctataaaagtttatgaaacaaaataattataaatttttacaggattttacaaagaattcacaagttggatcggataattcttcaattttactgtttgactcgacccaggaatcactaccaccatcccaagacataccagcaatttttagagaaggtttggtttagcactctttcataaaaattataaaaagagacttgtcgaatatacatatggaattgaatttctgttttgaagcccataccttcatgttaagtttttcatatattataacatggaatagagctaatcattcctgaatgcctttcttgggtgatatagaaaattgtatttagtgatagaatgttttatttatttctattaagttggctagcacatattctttgcactctttttcacttggaaccagccatggactgaacaatcttaatataatttctgtgagtcaaggaagtcccctgatgccttaaatactctgcgaaaacaagtagtaattatttggaagacacttaatatgagaaaacgtgcatggttatagttgatttctcaa

SEQ ID NO: 138971 - DNA, 1032 bp, Homo sapiens
tcaagtcacgggaatcagaatctgtacacaaccctgtcaccattaaaggaaagaaatatacttcaattattggttatgcaaagatatgtttttggaggaatttttctattagtatatatttcattcacataacaaattttaaaataaatataattttatagatattttgaacagaggccactccagctcatcttcaaaaggaataaagagtgagccacacagtccaggtacagtattactgtagtatttcaattttaaagttaaatattttgatataattggttgtatagaaatatattcaatatgttgtataattttaaaatacaggtattcctgaaatattcaggactgcaagtcaacgctgcagagacccaccatcaaatccagtggctgcctcgcctagatttcatcttgtatctaaatcttcacaaagctctgttactgttgagaatgcgtctaaacctgtaagtgtttataaaattacacaattaattcagggacacattggctattataatactgagttaaaattgtgatctgtcagccgggcacagtggctcacgcctgtaatctttggtactttgggaggccaaggcaggcagatcgcttgagcccaggagttcgagaccagcctggccaacatggcaagaccacatctctacaaaaatacaaaaaattagctgggcatagtggtgcaccacctgtagtcccagctactcgggaggctgagatgggaggattgcttgagccctggaggtcaaggctgcagtgagccaagatcataccactgcattccagcctgggtgagagggtgagatcctgattcaagaaaaaaacaaaagccaacacaaacaaacccaaaaaattgtgaactgtcatagctagttaccatttcagtagaaaaataatccccatctttatgatataactcaaccaaaacccaaaataataactgcaggaattgtccaacatattaataaatcagctaatatgcttaaatacagtattgaaaactatactatctaaatatga

SEQ ID NO: 138972 - DNA, 1126 bp, Homo sapiens
gtccactgtagaccatgcctgtagtcccagctattcaggaggctgaggcacgagaatcaagtcagtaggctgggcatggtggctcatgcctgtaatcccagcactttgggaggctgaagcaggcggatcacttgaggtcaggagttcgagaccagcctggtcaacatggtgaaacccatccctacgaaaaatacaaaaattaactgggcgtagcagtgggcgcctgtagtcccagctacttgggaggctgaggcaggagaatcgtttgaacccaggaggcggaggttgcagtgagccgagatcacgcctgggcaacaaaagcaaaactctgtcacaaaaacaaacaaatatcaagtcagtaattgctattaggattattacagtgcatcttaaatatcatactatgtattgcacagaaaatatttttctctttgaaaataaagttagcttctcttctcttgaaaattagacatttcaaaaatggcagaactctttatggaatgtgaagaagaagagctagagccatggcagaagaaagtagaagaaactcaggatgaggatgacgatgaactgatctttgttggagagatatcaagttcaaaaccagccatttcaagtaagcatttactttcagtgaagtaacgtttcataagatggttgtttctaatggaaaatatatgagatatctgtccttcatactgttgttcttctgtaaggagttagaggtaagagggagagtaaaggtcagtaagaacttgtgagaatcaaagcgggaatgtagttggggactggagtaaggaggtgaaaggttaaaatatcagatgtgagcaaaaggaaataactaagttaattgagggttaagatgacctgaacagcattgtaagccttctgagattggaaatcataatttttaatggaaccaagtagcctatttatttgttaatttttttttctcccttaaactcagatttacagaaaaggaagtgtttggaatacttttcttaaaatatcctgatatgctaaataagtttgtgttagtgtctgatgggggttctaatgtctaagcaactgcctcatcaaagtatcatcttgatatatgactataaaatgcataggtgctgcatga

SEQ ID NO: 138973 - DNA, 1080 bp, Homo sapiens
cctcccaaagtgctgggattacaggcgtgagccactgtgcctggccaaaacaaatatttattaaagtaatacatattcctagtttaaaaaaaaatacagtaaacatgtcagtaatagatatgaaatgtttccttctcatccccagcgataactactgttgtaggtttagtatacataatcacaaacttttttctgtgcatagacaaaaaataatttctaaataagatcatactatatatgttattatgtgccttttaaaattttttgctcggtagcatatcttgaaattaacaatgacagtactcagtttaaaagaatggggaagacctatttatttgttcccataatatcacagtggtgtcaacatgaatgtaaattactttttcaatcatcagtatatatgagtctcccttgtttctttaaatctggcattgcctggctttacctagtttcttaccccatagataatcatgtgttaagtacctactacatatccaatacactactgtgtgtaggaggaaatacaaagaaagaaaatatgtttttcactctcaaggagcttactttggagttgaacatgtataattaaggcacactaagaaataggcagtttgagatcatatatattaaatcttgaattgcatagcatagactgtcagtgcagtaagaggttaaagaaaaacaaatctaatggtttgctgaggaagttataattgaactaagagttggaaaggggcaaagaatcaatttggggggatatctgtttgaagttagatacttattaatatggcattttcctgaatctctgttaccacttctattaggtagatattgtgctcatgttagaggtgagaaaatagattcaagtaatttctccagagtcacataattaaaaatggtgcagtgaggatttgaactattcaatttgatgtcaagtgcatgctctttccactatactcgaatgatgtggacagtataaggtaaggagaaagggtattccaggtggaagaagcagtacgaatgaggacttcaaaggacacaatgagtgcggtattttcaagtattcagaatatacaaata

SEQ ID NO: 138974 - DNA, 1162 bp, Homo sapiens
gttttactacgcaatttatccaattacttttctgttacttttcaaaaaactaaaaatatctaaatgtatgtgttttcttatagtaataatatttctgaaatgtgaagaataggaatcagttaaagattaatgtcacttagcatttcagaattcagatttactaaaacatatattacaggataattactcatttttgcataaagatcccttttgaagtttatttgtaatctgataactccgattttttcaagtagtaaatgtttaatacatttaactatatgttaaatgtattcatttggaaatgaaccaattatggaaaatgaattacctgtgtgtattaaacatatcaaactcaaaaggtgggcttttgtaggagaaaaagactaaatttatgtgcatttaatttaacaaaatccacactagtagtagacatctttattttagagggtggaaaactgagacctagcttactgtcttgtctggagtcatatggtgagtgtgctggagatcaaaattagacccaaagattttggatctcaggtttcatgtttcaatacttggtgttacttaaagtgactcataacattgattgatgtcatgtgttcgtacttaggtgaccttgcaacttcatggatgacgacaaaccttttcaaccaaaaagtaagtatttctgctgtagttgatactaataggcatggtttttgtactgtaaacctttcaaaagaaaagattagagacagaagtgggcacattttcttaaaaacaaatattatttatttatttatttttatttttttgagacagagtctcactgtgtcgcccaggctggagtgcagtggcatgatctcagctcactgcaagctccacctcctgggttcacgccattctcctgcctcagcctcctgagtagctgggattacaggcgcccaccaccacacccagctaattttttgtattttcagtagagacggggttttactgtgttagccaggatggtctcaatctcctgacttcgtgatccacccgcctcagcctcccaaagtgctgggattacaggcgtgagccaccgcacctggcctgtttatttttaagacagattctcactctgtcacctaagctggagtgcagtggcgtgatctcggctcacagcaagctccgctgc

SEQ ID NO: 138975 - DNA, 2868 bp, Homo sapiens
ctgcaacagcccaggcttgtgcctttaccccatttcacagagaagaaaaagcgaaaaactagagaaaaaccacctctccaagaggtaaccgcacgcagcgcggaaggctgctagtgcgcaggcgccacgccccggtacgccccggctcttccggcgcgaggtcaccgaatcgactggccactggcgccggggccgcgcatgcgctgcgctgcctttcccgggcgctgattcctgagtgctgagcgcgaacccgaggagatgaagtaaggcgtcagcttccttttgaggaaggagcagcgggccactgggggtggtccaccgggactggtgtggtagagcgtctgcggggccgaggggcgggagcggcgcggggactggaacagctcgtcccctagttttgctcttcctcagctccggccggttcgcacttacttgtctgcttttctgcctaccctccccaccccccccgccaccgtgaagccctttaactaaggtgaagctgatcaacgagctgaatgaacgagaggtccagcttggggtggccgataaggtgtcctggcactccgagtacaaggacagcgcctggatcttcctgggtgaggtccacatctttcttcctcagtgctctccagattctcctgctcggtttccgactatttcggcattttcacccttcactcctgcttacattcatcgcccaccttcatatccatctgctgtctgcccgggaatccgtgttacatctcttttctgccccatttttagttttccttccctgccaaatcagtgctcatgagagttactgtttgccatttgctgtgctaaggttcagggactgttgttatttctctctcaccctctgacccattatactgctgaggaaattggggtgcagagaagttaagggacttccttaaggtcacatagctagtaagcgcaacaggcagaactatagcattctagaactcttggtcttagccacagctccatattgctaccaccaccctcccccattccccttcccttccagaattcactttgctcctctagctcctgctttctagtccatggccacgttaccattactgtattcactttatatcacaatcagtaattgtacaagtttgatgcttcaaagaggttattgtaccaaacattgtgctaagcactttatatacatcgttttatttaactcttataataatcttgcgagttacgtgctaatatccccatcttacaaatgaggaaataaatatttggaggggaaattattccctaggaaatgcttaacagtgtctttataacctttgtctatgtgtaggtggggttaatcatgacatatgtagactgattttgtatcatagctgtaaatttgtgggtaatgagcagatgaattcaacatgtttgtggaagcagaggtttgtgatggaaactatctgctttgtccataggattttgggtggcaggaggactgagtgatcagattagtttcgttagtggtgaccccgacttccactcaaaattaattactcctttttctgtactactggcaccttacatgtacttctgtcattgagtcagacttaatttctttctttctttcttttttttgagctggagtttcactcttgtcgcccaggctggagtgcaatggcacgatctcggcgcactacaacctctgcctcctgggttcaagcgagtctcctgcttcagcctcctgagtagctgggattacaggtgcccgccacctcacctggctgatttttttttgtatttttagtagagccggggtttcgccatgttggacaggctggtctcgaacacctgacctcaggtgatccaccctcctcagcctcccaaagtgttgggattacaggcgtgagccacggtgcccagcccagacttgatttctttaagggcagggcctgttgcttactgtttccacccctagtgcctggcctagtgcgtggtatgtagtaaacacttggtaaatgttggtggaactgaaatgtggttttctcttctaggagggcttccttatgaactgactgaaggggacatcatctgtgtgttctcacagtaagtgtcctttcatttcctgcctcctgagtcgacagagtactttgtttctgtaatacattttgtggcatcacaaaaaccacttattttcactctaggctgaatggcatccctgcatggggagggctggagcttctgttctagatcagtcccaggacatggttctagaatgttctgtgggagatccaagaggtttgttaatttgggagggcatcttggggatcctagtctatttctgttgtttttcactgaggcttgttcagcctgggcctagactggaacagactggactccttgggctcttgcaaactaggggtaacccatggtcacagggcccttctggcccttacctgtgtggcgtcatacgattggggcaaagcacagaggaaattggggtaaaaaacagaaggtcgtagtttgctttctttgtttctcgatgagtgtaaggttagtgagcaaaggcaatctctgcctggaggctgagaatcacagcccgaagggaacaagaatgaataggagacctgtatattcttcattctgctgaggtgttagcagcagcatttcatgggagagggtgttggcagctcatactggtagtagcagctggtaggagaggggctgggcagctggcctgcaaccccagagctaaacagcacagttagtccacagggctagaggaccttggcacaggtgcagaggaccactacgtttgggttttgtagtccttggaagcatagtactgtttcagagaagttggacagcatgtacaggtagcggaccatggcaaaa

SEQ ID NO: 138976 - DNA, 1248 bp, Homo sapiens
attaattaatctgattttagtttatttctgtccactttgtgcgtgataaacttcaaagtgatgtgttaaattctcccataactttctctattagtttctttttgcatttcaaatagcttttttaattaaaatttttgatttcttaattggctcataacgttttcctggcttatacctttgttgtgtatttaggcctttttcagtgtaaaataatcttcttagtctcatgtgatatttttattttggccttgaattagtctttgctctggatattgccacccattttttaattgggggttcctgttcttgtctgactttttctttgcaacctttctatgtcatcttgttctagatgcatctcttgtatacactatattatttgaattttgttttattaccttatctgcatgtttttgccttttaagtcaacagtgtcttactcttttataaaataaatagatatggggagattgttaacattaatctcgtgcgggacaagaaaactgggaaatccaaaggattctgtttcctctgctatgaagaccagaggagcacaattctggccgtcgacaattttaatgggatcaaggtgagtgtgcttattaagcaggttggttggacttttttcccatgtataggggtttcgttttctacctggttcccgcagacacaagggcagcacttgtgagcttggtgtgttgcgggggctgcagagatgtggagacactggtcaagaagagattccaggaaataattctgttggctcatggtcctgcaggacttgcttcttttccccatctgttaacaaaccatctccccaggagcataggcaccaggcctgcctctcatccaggcctctgtttttcacctttcttttattgtctactgtcatctctggtgtactggaggatgaagagactagcaaacattgctcttccatattgttgtgtgttgggggttttgggcttcatcatggcctcataatctagtacatagccatgtatgtctgtcatatatctccagtgacctagcatattgggccctagaaattctctagttaaaatctgatggcagattctacaaaagtaatttcatcctgaaattttctccccccagttccctctcatttccactgtcataagtgaggcactgagttcttagaaggagatagcgcaagtcaggcttattgatgctccatgtggttgctgcactcatttaggaaaagagctgcagttgaacagtgtcaca

SEQ ID NO: 138977 - DNA, 1049 bp, Homo sapiens
ggattacaggcgtgagccaccgcacccggctgtgaatgtttttgaactgtagcacctgtggttgatgtaacgtattcagaaaagaaaggtgctttttttttttttaagggagttcttttatttttttcccttttcttatttactgcttctttcttttatcctccagacaaaaaggaaaaaaagaaaaaaaagaaagaaaaagagaaagccgaccgggaggtacaggcagagcaaccatcctcttcgtcacccagacgcaagacagtaaaggaaaaggatgacactggccctaagaagcacagcagcaagaactcagagagagctcagaagtcagagcccagggaggggcagaagctccccaaatccaggacggcctactctggtggagcagaggacctagagagggagctgaagaaggagaaacccaagcacgagcacaagtcctcaagcaggagggaggcaagagaagaaaagaccaggattagggacagagggcggagctcagatgcacattctagctggtataatgggcgttctgaagggcgtagttatagaagtagaagtaggagccgagataaatcccataggcataaaagggcccgacgctcccgggagcgggagtcttcgaatcccagtgaccgttggcgtcactgaagacttcagctgcacagtagatttggaaataattatgttttttaaatgcagtcaaattcagttgggtggttactatttttgtatctaaaacttctggggctggattcttttaatcccttgactatttagagtcattgggagggctgcagtttcaacagctagatatcctggatattgtttgcaccatccattgtccctgtaccagagtatgtatcctgaactttggttcataaatatggctcttgaacccatagaccccagttgaagatggaattttcaggaaagggaaaatactagataattctagaattctagtcttcgtgttagatgtttatagcccagcatcttgggacctttccagttactaggtttggacagcttgatgtgaacgaatg

SEQ ID NO: 138978 - DNA, 1050 bp, Homo sapiens
aagtagagtgagtgagggggagagtaatagaagaatggactggattaggaacagaggaccagcttttatagggacttacaggtctttgtaaggcttttactcggaatgaaatgtggagccattgcagggttttgaacagatgagagacatgagctgacttagaggtttaacaggatcattccagctgctgtgttgaaactagacagtgggtggtcaagggtagaaacaaggaaacaagttgggaggtatattattttcccttaggaaaccctaacaaagtaccacaaactaggtggcttaaaataacagaagctgattgtctcaaaaatctggaagctagaaatctgaaaccaaggtgtcattggggccatggtttctctgcgactgcgtggaatccctctttgcctcttcctagcttctgtcagtggccattgatccttgccattccttggctttcggctgcagcactccaatctctgcttctgtcattgtatggctttttccatgtgtgtctctgccttcacatggccatctcccttctgtgtctccctcctcttcttataaggacaccagtcatattggattaagggcccaccctactccagtatggcctcatcttaacttatctaattacatctgcaatgacactatttccaaataagattacattctaaggtactggaggttagcatcacgacatatatttttggcggggacagactgtaacccatagcaggaagctatttcagtaatctgggcaagagataaggggagcttgaaccaggatggcagcaatagtggtagtgagaagtgatctggtaatgaatatatgtggaaggtagacccaaaagcctttgctgatgaaatgggagttggcccaagagaaagagaagcaaagatgactccaaggtgtttcagcttgaggaactgaaaggatgaagttagcaacaagtgtgatggtaaatgcagaaagacagcagatttaggagaaaatcatggtttggttttggacaaattaaatttgagatgcctgttagtcattcaagaggc

SEQ ID NO: 138979 - DNA, 1108 bp, Homo sapiens
actattaacatattgatgcatatttgatgtgaatattttcaaatctttttctatgtatttacatagaaacacatgcatgaacacacacacatacacacacacacacacacacacaagcaaacagggctgtttacattttttgttttaaggcagcagtagtcagaaatttaaagttcagaagtcgagggcacattcctgtgtttttcattttcgacaagtagaacaatgcagccatatgccggtccctctctggagttagtacccaatgcttggaatgtgagcagatgctgaaggctattaatgaagtccttgaagggaggcccattcatgtatgttgtagacacaaggccaaagttgaatgtggtggccaactgagcagctggtaagggactaggaaagcgaggaatgcaccaatgctggttgcgagttgatggaccatgggaaccacatcatctggaggagtgtcctgccattgctgtcatttaggaaatggaagcaacacttggagtcctgaaggcttttaacctcagttgttacattagtgtgttgcaaatgtgatagagaaaaaaaatctgggaaaaatgatctgatatggtctaaatgaaactagtttttatcatgcctaaaattggaaaactccaagactttctttttttctttttgatttcttggatacaaagaacaagacacagtaatgtgtgtttgattaatgccaactccctgaactccttaatgtcaactagctactcttcattaccaaacaccacatgtgctcttctttcagtttaggcataccagcgcagctgcagaagacacagtggtgatctctatcacaccaacaatcagatatttgtcataatagcctcctaatcatatcgcatatgaagcctcaatgaagtctttataaccagacatgaaataattaaccttttctaatttaaaagacctaatagggaatggtctctgtgacaggtgtaaaattccattccttctagaaaattactcacctagcagatgctccttctgactgaaagagaaatttcattgcaaaaagaatgttcaccttttattatgaatattgcacaatgcattaagacaatggctttcc

SEQ ID NO: 138980 - DNA, 1363 bp, Homo sapiens
gttttttgtttttgtttttgttttcacatcagaggtcaacaaacttgtggctttcaggccacgtcctgccttcaggagttttgtttggcttggatagtggagtttattatgtgaaggatataaggactaagctcatgtttccttctggtaacagtcatttagagctaagtagcagtcgcctccttttgactgcacttgcactccccaggtcatcttagccctgcctctcatttcaacttatttgcctcacaagtttggatccttcgagtactttggtttcttgctccttgtttacaggtacatcttaaacctgctgttttgggatcactgactactgtgatctgcatgaaagtggggaacatgatttgtttcctgttgtatttatcctggttctcagaatcacctgctacgcagtagacagtgtttgtttgatgaatgaatgttctctctatctggaacactgtgttagtttggattattgattctaatactccactcatccctgtgtctttccctttgccatgagactctgcagttttttgttttgttttgtttttggagacagagtctcactctgtcccccaggctggagtgcagtggtgcaatcttggctcactacaacctccacctactgggttcaagcaactctcatgcctcagcctcctgagttgcttgctcccgagaagcaagaaatgaaggcacacaccacctcacccggctagttttttgtattgtttaagtagagatgaggttacaacatgtgggccaggctggtctcaaactcctggcctcaagtgatctgcttgcctcagcctcccaaagtgctaggattacaggcatgagccaccgcacctggccagactctgcagtttttttctaccctttgacttcagacttcaccatttgacttgctttggccaataggacattcatagatatgacgtaagcaatgacttatgtgatcaggctagtgcttctgccattgcatgaaaagaacctactctgggtagcccatgggtccaaggaggatgagagaaatgtggaaaagacctgtctccatagccaccatttggagccaaacccagatgaggtcagctgatctctgggtgacactcagacatatgagaagtaagtgtttgttgttttaagccacaaattataggatggtttgttaagcagcaataactaactgacacatatgcccaatcttcacttcccaagctttcaaaatacggcccatcctcagttcatttcaataactgccgcctaatattcagttatgtcattgtcctccaaatttttatagcacattattattattgttatttttaattttactttaagttctgggatacatgtttag

SEQ ID NO: 138981 - DNA, 1049 bp, Homo sapiens
catgacaaccgtgttattattagctccattttacttatgaggaaactgaggctcaatactgaggttgtgactagcccaaggtcacagagctggtaataggtgaagctgtcaatgttcatggtatttaccatgagactacactgctccccacctctccccaaatttctccctccattcagaatgccttcgcctactcttattcggcacagtccatatactttctccaggtattggtaaccccagaaaaagcaatgaaagcatttacaaaatactatgtgccaagcactgtatcaaatgtttttcatgcagtatctgatttaatcttaaccaaaaactccagtatcctcttgcatagggcataatgaagcaatatggttagcagttaatagcatcgttttaggaatcaaactaccattttacagataaggaaagcagagcctagagaggctaaataatcacccaaggccaaacagctagcaagtggcaaagctgggatatgaacttaaaattttctgactcaagagactgtgctgttaaacacagaaaacatcttttaaaaacactaaatgtgatgttaagacaatcagtcatcaaagtttatactattttagtgaggtggagagcaagggtaaacacctaacttaattttcttttttctgtgacatgttgcctttcctgtgtccctctctaggtgacggagcctcacatgcagtaatttgtgctaacatcagcataatgagacagagcctaggcactgtgcatacataagccaaacaatacacaaaacttccaattgactaaaccagtcatgccggatttatgaagagaaaagaaaagggcggacgacgtgaccaaaatacactctcactgaaaagcactttttgtccccccacccccgccccgcatcccctgctttattgccttgtaaaacaagaattacagcataaagcacgtggcttatatcacaagcaggtcacatgtggtgctggtgacctgcagctcttatctacccctagcagattcacttgcagccttcttctgtctctgca

SEQ ID NO: 138982 - DNA, 1070 bp, Homo sapiens
tatttcttttttgttattaaatcagaatttcaatgtgtcctacttgctactgctgaatggtgcatttgccatacagatgttgatgcataatcaatgaacttttttaaaatgccagtgttccccatagcagaatcatcattcattgagtagggagggaggcagagctgagccaagagaaactgattctttcttgaagaatcatgctgattctctggggtccactgtacactggtcttcagagtttgagaaaacttgtgtcaggggtcccctatataaaagatcaacagaacatggaccataactaaaagatgttttactggtctcatgttttgctagcctctgtgtgtttcgtcacatgatcagcttgtaaagtccttaaaatgaactaataaaacatttaagtgtaggtagttatgtagagcccccaaaaggagggaagctgaggaggttatggccccttccataaccacaattatgggagaggagaggagatagcaactatggagaggagatgagacaaagctgaggttttgtagcctacagcaaagaaaggagcatggagaatggcctggaattgagaagggacccttatagtctttcattcagcctggagataaacatcatacatgaaattgtccaagagagaaggaacccaccagaattctgtgtggattttcttctcagatcccaaatactcccaaaggctgcaaatagaaacaaaggtgatttgatagatgagacagcttaaaaattttctgactacaaaacacccattgctggatagaatatttcattttcaaatgcatagttgagtatacaattaagaaagagaaattcccaaaagtcagagtccccccaaaagactgagagctgagtggaaagcacatgggttaaatgtgaggcttttctggcatgggagaatgttagtttcagtaatccaagggcctgagttttatagaagtttatgtaagtataggagattaatccattgacttacatgagatgatgtagatgctggcatggatgcagtgaacagagaacacttctacactgctggtgggaatgtaagc

SEQ ID NO: 138983 - DNA, 1062 bp, Homo sapiens
taattttgcaaagccagttttatgatgatcaaatcagggtaattttcacatctgtcacctcaaacatttatcttttctttgctgtgaacattgaaaatccattgtttttggcaaggccttaggcatgatcttcccatgttctcttttaaataaagtccatcatttcaggcagagctgtggagctctccatccttatggcctgactctcctcctgggcagtacttctgcaccactgtattggagctgaggtcaggggcagtggattgcttcttctggagtggcactcctgctttaccagtgggcactggggatggtggtagaccctggttttctcagcttgcctatcccatattagaacctctatcctctgaatgagctggggtggagccaattgggtaccactcctctaggcctatcatccctcagggagagcccttgcactaccagtgggagctgaatggggaaagggaagttcctgtcctctcagacttgcttaccagggatagaacttttgtaatatagggctggggaagatgagggacaccagcagcctgctcctctcaggttaaaactgtagccctggactagttgtggggaaggggaacacctgtcttcacatctacatgtgccagagttgagatttcatcgcacagatcttgttgggtggagcgtgggagcaggtagtagctcaaataccacaaactctcactgtactggttaagatttagtagattttcttggataaatgtttcttcatttgctgtatgttcttggggcaatttccagaaattctacatggtttataaaaataattttcagcacttaaattgttgttttactgcagaaacacttcgttgaactcctcacaccaccattccagaagtcctgcctgtccatgggccatttcttatatataaggaagaatgattcagtggatacaaccaagaactcagagggtggagccaagagctaagaagaatcattcccagagatcaggactgggccgtgatgaaagaactagtgatggatttcagaattgctatggaatgctatgtgtttcct

SEQ ID NO: 138984 - DNA, 1048 bp, Homo sapiens
aagcatagaaagtgatttatatttttaatggttttcaagtggaagttcctttgaatttgtcagttcattcctggaaaatcttttgagttaaaataaggatcctaggacagcacctcgaactacaggccctaaagagaaattgcctcaaaccacaagtgctgtaacttcctcccctttctgtcaattggttgtctttaaatattgcaaaagtcctgatgctaaacagtatttggagtgttttcagtgtctgtactactgttgtagaccttggtatttttttaaacactgttaactgaaatgttttgatgatttgtatgtgatttgtgtttctaaacttctctttacattaatgttgttactggtgaaaggcatgagagcagcactaagtcctctgtgtaactgccattgtctttccaatccccagtagaccagtaaataaataacacatcagtgtcttctagaaggtgcctgaccaggttcaccttttaaacgacaaagcatggtttgtggctttttgcaaaattactatgaaccaaaagttgacaaatgttccaaagttattttctctaacatatcacattaaagatctgtttcagaattgtaaaaagtacatctagatgtgtttacagaaagcaagtatccagtatgactggcatgtgttcatgctattcagaatcacttgtaaatagtctgcttttaaaggagggcatgttcagttttctgtgaattaaaatatgctcatgtgtgggcacacacgcacaaacacacacacgcacgcacacagtggcagaagggatttatattaatattctttcccctctggccttcttacagtctgttggtccctttgcttctgttgtcagtgtgttgaattgcaaaccgagtactgctgtaaatactatgtttacttcatgctgaatgtttgcaaagacttgatataagtattaatagtaatgaatcaatgaataaataatgagctagggtttgtgaggctttctacaaataggtcagctccacctggagtgcgaattgccagagacaccttggt

SEQ ID NO: 138985 - DNA, 1037 bp, Homo sapiens
tcattgacattaacagatgttacaaagaaaatcggaattgagagaaacaatgctgggcaagagctattttagtagagtgatagaggtaggggccagaatacatgacattagtaaaataaagtaaacaaagaccatagatcaagaagttgggtactaagcaaaaggaaatatggatattataaatggcaactagaatcgataaagttaagggtttttgttgttgttgttgttgttcaataaaaaggaaggaggcaatggagagtatgagattgaagatgctagaaaataaaagaatactatggaagtggaatctttgaaagaagaaagggaagggatccatattcaagtagcgtttactttagagaggagagagccctctttctctgagacaagagaggggaagctgaaagaatataggtagcccaggcttctccatatactaagagattgtttattcatcacaaaaatgatttggaaatgagaccacgaggagaagggaaccgatttggaataaatgctatgggcagtatggaaggaagaaatcagtgagaggtgagagacccatcagcaagggccaacatgagtgtgtattgatgtagctgcctagctctgcaacttcctataagagttctctgtggcccaggataagagagagtggagtcaagtgactgtgagttggggattggcatggtaagcctggccagaggttttcaggaagctgaagcaatacaaggcactgaggaggttgcactgggatctattcagccagaaagcagctaatgaactagcttagtgaacttggccactccgtgagattaaagatcccagcaaggaaagagagcagtcttggggtgatgagaggcagtgaggaaaatggtagatgaggattctgtgtttgagatgggaatttagagatgtaagaggggtaacaatgaggttccaggtgcatccatgctgacagaagcctggttggaatggtgacaataacctgtagaggcaagggaaagcaaggcattgtgaggtcaggaaacccactt

SEQ ID NO: 138986 - DNA, 1023 bp, Homo sapiens
ccactatgtatcatataatagacattaattaagaacctgagtttgtactttgcttcattatattaaatgatatctcagaatcaaatttctacataagtgtagaagctatctccctatcctctgctttccattcccttgtctgatctcttctccaccaattttcctcttaatgttgaaagtcttaggctgggcatggtggctcatgcctgtaatctcagtactttgggaggctgacacaggcagattgcttgagttcaggagttcgagaccagcttgggcaacatggtaaaaccccatctctaccaaaaatacaaaaattagccaggtgtggtggcccacacctgtgttcccagctacttgggaggctgaggtgggaagatagcttgagcccagtaggtcaaggctgtagtgagccatgatcacaccactgcactccagcctgggcaacagagcaagaccctgttaaaaaaaaaaaaaaagaaactctggctaagtagaattttgttacacatttattaagaaactgatttgtctggtaatcatgttcctatcataaaacatgaataagattaatttaaatccacatacatttttgtgaaactatagttagataattaatgtgtaacaatttatgatttgcttactttatgataaatcaaaaatgtcagctggcacagaagtggttcttttcatgtattttcctgtctccgatttcagttttattctatatgaaagtacattgttccccattatagagtagtgtgtgaatttctaagcttcagaaaaagttatcattagatcagactcagtcattataatgtgtttccagaaatcactaacagttcattgttgaaatgaaaaatatcacagatctactgtgggcaggagaatggtataaaaactttaggagggatatcttaccttttttgttgtagtctaccagtgatgtgacccagtcaatttcaggtagagatttacaaatgcaaattgctgaaaaatgtttccacatgccatcaccattct

SEQ ID NO: 138987 - DNA, 2192 bp, Homo sapiens
gtttaccttatttggtggcatatttttatttctataaatagtcttgagttttgttctaaatgcagttaagtaacttgggaaaattttggtccttttaggtcttgcttcttaagctttgttcagcaagaccagaggagtttagggctaatttttctccactattaaggcagaacccttctgatcacccagtaccagaagtgtgagtttttctgctctggctggtaggaaaaggagctattcccaaccctgtgggagcttttcagggattgttacctctaatgctcaggtagtttcccacacatatagacattagtactcagctaaataatagtggaggaccctctgcatatctctgaagctctttctctgtgcagctttcttctttctggtactctgccttatgaactctatttccatagtcttcctagactcccagttcagtctccttaacttgggaacaccatcgtgccctgtctgagttcccttccctgtgctgaggcccaaaaactctcttattaggaaactttcttattaggaaataaactggggcaatcatagggatcacttcatttggttcttgtctctcagtgatccctgtcttcattgtcttatgtacagttctttaaaaagcattatttcatatattttatccatatttttagttgtttaaggtaggaggacaaatctaacccgttactctatcttagccagaagcaaaagtctatgttgggtattattcttgagaggcaggttagaataaaggaaagcacagagtctaatgtcctggattcaagagccagctctactgtttgctaattgtctgacccagggcaagccacttaacctccctaacctcttttgatgctcagttttctgtttggtataatgttctacccttctaccctgcaagcttgtgctgataatgaaatgagataaattcctatggaagtatctagctgagctcttgaaactgaaaaagtacttagttttttccccactttttttaagatacatgacttgggtaagtatagctggcacagaaagaggaggtatggagttgaatcaggttttctgaatcccagtcctatactactatattataatcacactacatctttttttttaaggatcccaaattatatgtcacctgggtcacacatcactccccatctttttttttttttagaaaaaaaatggctcacagttgacaaatgcttctaggaagcaattttagggattaaaataccaagttaatgcatttaagttttaccaaaatctttgtgatagtataatggacactcttgaatttatttaaagacaagttcgtttgaggccaccttttccattcttcccagcccttggtgccatataacgatcatgcttgatactattacccacggagccaacctcagccagaggtaaggtattagatggaggaatggaactcttaagaacaagactaacccaacccatagaatgtgagctattatcagagataatctaaatcttttgatgatttacttgctaagcatggggagagaatttggagttgtgtggtcacttggaactgctgcagtgacatctgaaacactgaacttggaaaagtatgtatagtctttcatgtctctctctctctctgtctctgtctctctctccctctacttctctccttctctccctctctcctctccctttcaccctcctgtggacttaggttaccgcattcgcctgggctctagtactgacaagaaggacacaggcagactccacgttgatttcgcacaggctcgagatgacctgtatgagtgggagtgtaaacagcgtatgctagccagagaggagcgccatcgtagaagaatggaagaagaaagattgcgtccaccatctccacccccagtggtccactattcagatcatgaatgcagcattgttgctgaaaaattaaaaggtatcaaaggcactcaagcttcatgattaaaagaactcttttctttagagaagtgtcataaatataattgcattgttgacagttacactttgagtttcctactaatggattctaagcatttcttgtgttggagccttgcagatagagaggtgtacctagtaactcaagaaccaggaaatttatccctactacctgtgtctgctccttcattgtctcaagggatggcatttttctcttcagacat

SEQ ID NO: 138988 - DNA, 1027 bp, Homo sapiens
aaagcccatgacttcaaatggttttcttggttgacattggaaatccacattcactttggtgcttaatggttaaagataaacaaaagaaataatcaacgtgatagaagcctttgaaatgtcatgtacaacctgccctctaggaagcccttatgggcagtgtagcctatggaactcctggcatattgaacaaaaggaagagggggagtttatctactctggctttagccatatgcaatgaatacgtttgcttttaaatgaatttataaaatattaatgtaattatacgaaacagcagagtggtaagtacatcagtcaggagttatatttatcctgtatatttgttttttgtttgtctccatttattagtagacagtaaatggagacagacatttccttctcagccaaagtggcagaacttgtttaatgagctgatgtttctgtaatctgtggtaaggtagagttgtgagtgacagagctatacgaataacaaggaggcaggcagaacaatagaaggaagacaaacatttcagtagaagaggaaaaatagatgggattgttttgttggcacacaatctaatctgatcttttcctaacgaaaaataacagtttgtaaatgggtaagataatgttaataatttctccaaaatcttctgcatgagaaatcaaattttccgaagacataaatggcattcttaaccatagtgctcttattttacagcataggaagacagggtatcggaagccttaagttctctaagatcaaacgggaaacctagacaccacccccaacacttgcatagagcctgacatataggaagcctatcacagatgtttgtgaatgtgtgaatgaatgcctcaattagtgaatttatcagtgtgagttttcacattttaaatggaaggaaggaaacttacctatcagtactatctctcacgccagaggtcttcatatctgttctgtgctttcgtcctttgagctaaatgccattatttacccccacttttaccaaaaaggaaatagaggcat

SEQ ID NO: 138989 - DNA, 1032 bp, Homo sapiens
agagcactcaatcttaaatcagttgccctctagttcttagatgtatatagggacatgccaaccaagagtacttgcctgaaaagcactgtacccagggaagcaggccctgtcggtggagtttggttcaaaaatgacacgatcgtattcagataatggcagacacctccctcctggttccctttaacgacatctgtccttctgatttacctcagtttcctcctgttcatctcccttggtcacccctgttgtgagtgcatttactgctgatggaaatgtctaatatgcttggcagtgtaagtcttactggtaacattcatgcgggaatgtgccgacatcccatcttttcctctaaccagtatgccaaaccagacttgtcgctctatacttgggacttctgtagaggcttgtttggtctttattttgtgtgtgaatttgtctacacccaaccacaagtagatgctaagctctctgaggaaagagcttcagtcttctcagagtcctctgcttctcctgtgtccctctcagccattaacaaatagcacaacaggggctcagtcagtatctgttagttcatttgtaactagaaaatattacccctggtggattatactgtttctgaactgagatgtactctttttttcttctcagaagtaagcttttactctaagcttgtattggactctgccagaagtaaacatgtcttctgtgggtctgtgctgcaagctacaatcagattttctaaatgcagtggcttaaggattatatgcttttcactacagccgagagggtgagtaaaaaccctgacccattgcattccataggtgctgccatcatggaaagagcaggctgaaggcctttgcttccttaccttagctccctttataacccaaattctttgatgggccaggagggctgcctctgctgattttcacttaacctctccatgcctccctgttttcctcagaaaagcccatcaatatcgacctgctttccaaggatgtttgaggatgtaatactgataagaaaacactc

SEQ ID NO: 138990 - DNA, 1030 bp, Homo sapiens
tatattaggcgtcatccctgccatcaaagtttttattgatacatctcagcagggaaaatagcaagggtgcccggttagctattaatacaaggtaaaatgctaataggcatttagagagtcacattagtgctacgtatctcttagagaggtacagagtcagaatactttctatggtacaagagaacatccggagtggaaaatgttcagttcctgggaaacaaaatggggaggggtcccttagacaaaaccagattatccttgtgatgttaaattagtactgattctgcaatgaagagtaatatttaatgctacaaaccctgacttaaagaaaaacgtactgaaaacagaatgatgcagaacagatcattgctggattccttctgctcctttgatggaaataaattggataattttgattcctttatcatcctttatgaattatatttcctagtagaatgcaaatatcattggtaaagaaagaaaagcagagatgaatcatcataatgaatgttcaaataaagaacatcagattcagaaagctacattactatattgcctaaataaaaccaaccaggatttcccactgcaaacagtcttaggcttttgtgtataacatgcttgtttaagtgcagtgactggaacactgattccccctgggtagtgctgtagttggtagtactgtcgcaaaggctttctggaaacccaacaaagttcttctgttgaggttctcttagccacttcgagtaaaatgcatccctcctgattcattggtatccattagctttctttgtttctgaataacaatgtcctgccccagacttcctaccaccaactggaatgggaagggtaatgcagaaggatggcatgtcttgtaccatacccaacccactcaccctccatcctcaccttgggatctctggcacttgccaagtgacttcgctgtatgggaagctcatagggattgaagttgcacctgtgggtgtaaggaagggtctctctagttgtcagacagcagattcagcttactctt

SEQ ID NO: 138991 - DNA, 1128 bp, Homo sapiens
ttgagcaagtgaaaggccacacgtgttctaactcatttttgtatattaaaaagcaagacagagaagtcatcttttacctcctgaaaaagaaaatgctcttttctctttggaccttgtctctaggaaaagtccatcctccctacctacgaatgtaggtatccctagaagtatccctttgccctagtcatcaccttacagaatgttgagatgcaggaagaggaattaaccctatatgtctggaaaacatcaggagagagaaatcacacagtaatttgaacagaaaaattttaatataaatattaactataacaggggattggccagtaagaagtaaaaacaactacaaagaatataggactaacaaatataaggagcagcccctacacctagagctgaactagggcacccaggagagaaccttttccccagggctgagatccatatcttgcaggacaagggcacagtcatgactcattaaatagcagagaaattgctgtggtactacatcagcagaacttgctggaattctgccctgtggaacttctgggaaatccaccctctatagtgtcagggaaagctggtcacagagaggtatctcacaataggcaccccaccatgaaacatcctgagggatgggtactgggagaagctgctgggcactgctgattatactaccagagctgcatgcttgaaaaattgcacatgctgcaggaacctggtgcttggggagctgtgtgtgctgtgggaactgggccctggggaagctgaaagcctgaactacaggaacctgccaagtgagcacacctagcacaccagcacacaggacccacaaagaaaagccccttcctcctgaaatgtctccctaacgccctctactgacaaagcttaacattgtgccagctggcaaaggaaaaatatataaagggcccagaaccattttcacagagcaggcaacaagggtgaatttggagctaagaggtattagattgataactagcacacctacatagctcaggtaatagtcctcaggtaatagtaactctctaatagtgttattgcctagccctagctcgtattctgagtgatctctcttcctcttataatttggagatgaggggatagaaatca

SEQ ID NO: 138992 - DNA, 1683 bp, Homo sapiens
tggtaattacagcgatgtccctgggctcctattttgaaagcatgcgccacattcatgaccttccaggctcaggtaacagttgctctttcctgggattatgttgtttattgttattggcatctgatatttccttctacttctctcaagccagggttttccttccctgaagtttcttagactactcctccgtgtatctgaccctttgcttattagaaagcgattatacccagaacaaaatgctaatttcccatccatcagaaagtatatgagggcagggaagtgtgtccagcataccatacctttaagaaatgcttcttagagggagaaaatgaaaggagctcagagggtcaagtggatggagataaggatgagcagttttcagccttgggccacttttgccagcagtttgctaactgcccttgagctgattcccgtggttccttctccttagtcagaaggcatatatatattccccacagggcagtctcctcagactaaccatgacggtcctgcagcatcaaaccataacttacttgttcaacatcatctcctattccatcccacagctatggccatcatggttttctgaatcagaatttgaataaaaaattaaagcaagtggttggatcaaatttttttttagtttttccatatgaaaaaacttaacaaatgtataaaaatgaagtttcattcattggctcacctttattacatttcctatttaatgagtgctttcatgtgccagcactttgctcagtacttggtgggattttatcataggctcttcattgcaggcccattttacagaagaggaaactaagccccaagaggttaattaattaacccaagataatacagcaagtaagtggtaatcctgagacccaaacccaggtctgtctgactccaaaggccaagctcttaaccattgttatgtcttccttcaatggcattttattcataagtgaacagaatgttatgaaaggcagacagccctttgagcacttagagtgaatcatggctctacttgacattctcccactgctctctactcaaatcagtatcctcacagatatgcaacctcatgtatgcctgcccctttggtttagctcatgctgttctcttcccataccctttactcactctttagtctagaatcatcctcttcctcccctccgccagttaaattctatccatcctttaaatgcttaattccatttcttccatgaatgtttccctcactgacttctctctttcccatgccaccatagcacttattgttgtgactaccatatttaacccttcattatacactatttagggcatgtgaatttttttttttttttgagacagagtctcactcaggtgcccaggctagagtgcagtggcagaatatcttggctcacagcaacctccgcctcccaggttcaagtgattcttgtgcctcagcctcccgagtagctgggattacaggtgtgcgtcaccttgcccagctgttttttatatttttaatagagacagggttatgccatgttggccaggctggtttcaaactcctggcctcaggcgatccacccacctcggcctcccaaagctgggattacacgcgtgagccaccacgcccagccacttatgaatctttgtgaggtcaggaaccatgttttatattttaaatatgttctcata

SEQ ID NO: 138993 - DNA, 1094 bp, Homo sapiens
attcagaggttatagttcatcacaggctgcagagaacaaatgatagattccgaccaagggcctaaagttggagctagccaaccaaatattttctggcagtatttagtacttcagtgccatcttttgtctctccttatttaaattcttaagaatcagttgaatgcaggactttttctaaactttaatggtttatactagtagggaagggagggtgaacatgaagcttcatcaaaaagacgactatctatacagcagtagttcttagactggtcaggaaattcactgcattgctttacaaccttcattaagggcactcttccattgagagctctcccatggaaagaagttggtcttctttctctgggtcttcataaatagccattgcagggttctgcatgtagtgaataagcagtaggtggtatcacatgtactgtttggtttctcagctctcagcactttagaatctagattgtggaaagaagaggagcactttttactgtgcctttttattctccaatagctcttcaaacacattgttctgatcctaaagtcaagcctatagaacaaaccaggatcctccaaatgtgtccctatctgtgctaaagagaccaagctttctgttacaaagtaaatttttttttcaagacaagcatcatatgaatccggatattggacattgtagttgtttattaataataaccattatcatttgtgctatactttagcatattttcaaaatgttttccgttaacagaggaaagaaaagaggagggtactgatttagcacagtagacagtatgaagcagaaatacctgtgtttgaatcttggcactgctgtttaacttttctatcttaagactctgttttctcaactgtaaaatggaaataatatcttcataccaaacttataaggtcattgcaaagattaaatgtggtaatactcttcaatcttctagcacagccgtccgcaacctttttggcaccagggaccggtttcgtggaagacaatttttccacagactgagtcggggggtatggtctcgggatgaaactgttccacctcagatcatcaggcattatttagattctcataa

SEQ ID NO: 138994 - DNA, 1065 bp, Homo sapiens
gacaggacacttaagtacagctaaatccccattctgaaaagcagtggtaaaagaattgaaacataagaactgggaagggccatttttgaattgatgacctcttccccatcatacctctttcctccctggtcatcttaaagcacaaagattttaaccacaaaaggttattttctgctgcctgtcatgcctttttgcagagaatgtgaaggtgcaggaactaatcaggatctttcttggagctacattgtgtaaattctatgaatctgcccctcaagatcaatattccttagctacatgaccttattctttcaccagtacagcttggacaaaatgcattgtgcatgtctatgggagtgggagacatgaatttgtaagggaacgagcatgtgtatgaatgagcacaggtatgctaatgctggcaggattaggggagcagagacaagataggttttagtgataaatatatgttgccacattcccacagggaatttgacatcctcatcctaaggaaaatattgaagatgaagaaaatagaagagtgagtaattaagatttgagaattcttatgggacgtatgaaaattttatgctttagtcacaggaaatattctgaacaattatgtagcactgtgcttacaaaggtgaagattcatttaccacagtacagggtacattattgcctgaatgaatatgctttgtgcttccagttttcatctttttcagaggcaactattgccaattgcctagtttagctaataagttagagtttttgtactacaagctgttgtccaagacccaaagtcaatttaccaattagtattcttcctctttcccaatagcttcccacctgcagcttatccatccagaaaacgggcagagtatggcaagagattatatttattgaacacagtttagggcatgagatccattcagtctggagaaaatgttaatgaatcaagttacaaacccacaagtaccagaaacatattcttagttctccctcagaaactgcactggagaagcagcttcagtggagggcccctcgggtcagaagataaattagcca

SEQ ID NO: 138995 - DNA, 1044 bp, Homo sapiens
ctttcagttttctgtggccactcatggttagttttcctccaggacaagaatttgtagccctgtgcacctccagaaagaccaagcaatccccatatacaagtctactgttagactgaaagcttagttgggaataagaaaagaatcagataatgtggcaaggtggtggacagcaggctggggtggttggaaagaggggacacttagagatcattttgttcagtgattctcaaccaacatgcctaagggtgtatttatctgacactatagcagtgatccttgtgagagggtgatagcagctagaaggaggtattccttttggagcagctaacaaaaaacatttacagggagaagggcatttgtgtagttttagaaaactgctccctgcccccagctttaattgaattaagtttccaaacatacagcagttcagtatcagaactatgccttgattttgtgtcttcagactccctatcctgtcttctttttcattgcattctgctatgggaaaaagaaaagagaaaggaagtaacataacaagggagaaagaagagaaaagaaaataactgcctgttatgacctgcctgcctcctccactgtcacttagtctcttaaaagtgtcaaatagcctgaacccttgacttcaaatgccagccaccctgtctcccttgagcccagttacagcaacattcaactccttgctaaaacatgccctatgctttcaatccattccctctacctgaaatatcctcctcctcttaaccaggcaaaatccaatatgctcccccaaatgaaaatgttttaccactgtgtgggttactttatgcaaagatatctgtaagtagtaacttttggctaaataagtatgcagtgcacttccacagttttcatcttatttgaaggaaaaacattgtcaagaccaagctccaacatggcgacttctaccattaaggctacccagatcttctagtctgaattaaattctcctgtgttcaaattagcatttttctcttatagcacttactatttcttgtgtattataggaat

SEQ ID NO: 138996 - DNA, 1045 bp, Homo sapiens
ttcttattcccaactaagctttcagtctaacagtagacttgtatatggggattgcttggtctttctggaggtgcacagggctacaaattcttgtcctggaggaaaactaaccatgagtggccacagaaaactgaaagacttgagcacctgctccacaggcagggaaggggataaaattactgggctgccactaacttgcaaaaataactcgggggctatcctggatgcaaaagcagcctgatcctttcaaagaacaattgtgagaaatgatgtgtgttgtggggagggcagagaacagagtgacagaattctaaattatagagctatccttcaaggcctaattctttagaactttctcagatatagtttggatgggagtgacagggtagggtagagaggggaagaagatgatcggtctaagattcatagtcttttttttaagctgacttactcttaagaaagttttaaattgcacacaaaggaaaatgcaccctccgcatgacgctctatgaagcctaattattggagcaaatgtttactgaattaattttagaaatacaataccaatgctgcctgtttcataatctaggggaagtattttcttctcaagccatgttcagcctgcaacaggaagccaattatcaccccagaacatttctcagtgaaaaatatgtcattccttcttaggacaattaaggcttaagcaggcttaagcccccatctcacagtgttttcttatttttaccatctaaatacctatcaatccaaaccaagatcaattccatttacataacctaaagatgtcactaacatttggacaagggaaattttggaaaaggacaagatatcttttttgcttacttgaatgcccacattggcttttcctgaaatcagaggataataatggggctgctgagggaaaaatgcaggaaataggcagtggtactgattaaatgagagtaaattcagttttattactttcatgtaaactcagtaattctaactaagaactaacaaatgtagtccctttagaattcctaggaaa

SEQ ID NO: 138997 - DNA, 1330 bp, Homo sapiens
tcaattaaatcaaaatgaaaatggggccaggtgtctatgctatttcagagcaccccagaggattccaatatgcagccacacttgagaagcagtgcagctaattatactgtatcaaaggactattatacatgtacctaggccactgtgattcagaatgctggacatttgtagtattctgtgacacagtgtgtccagagtcctctattaggaactgaaatgacagaagtgacagtaacagagtagaccaaaagatggtaaagtggttgtgtaaatgttgacctctctaggtatctcaacacagaaagaagagaccacctaatttgcaattttctctttctctgctttctctgctctatttcctgatgtccattgattatctacagaaataaaaatccataatgatgaaattccctctttttgtgtgctaaggggacagtcttgatttttttccaatcttccatatcctccataatgtgagctattcaatttaagtcatgtagattgtagtatttcacattgagcaattgcttgtgtaatataattaattttaaaatattttgcttattctgcatttgaattttaagcaaaagcatctttagtgttcaagctgttttgtagaatatggtgaggtgatgagagtggtacacaaaaccattagagagatactcaactgcagaaacagagtgtactaattttgggagagggggcaggtttcagcaggtggcattccctatctccagccacattcttctgcatatttgattcaatagaaactataacagcagcagtagcttttattaaatattgattgtatgccaaccgctatgaccaagtgctttacatgtataaactcaagcaaacttcccaagaaatctgtaagatagacaccattccccacttctttacagattttttaaaaacctgaggcttggaaaacataggaaatttttccaggcgacaactaataaatagtataagcagatttgaaagagggaggcagagtaacagttgttaagagcacgtgttcagaatcctggccctgactttaggcaagttattgcagctcttgaagcctagtttctttacctacaaaatagaggtaataataccaagtgcacagggttgttttaggattcagtgagaaaacgaataaatagtgcttagtgcctggttttcttttattcagtgaatatttatttagtcttaataagtgtgaggcatagtggtaggctttaagttaccacaataagctgtgaatgagacagaatccaattctggccttgagatgctaacagtctagtaaagaagacagtcattaagcaaataacta

SEQ ID NO: 138998 - DNA, 1053 bp, Homo sapiens
ccagttccacactacacaatcttttttcctccctttcccaaccctcctacctcttccattttctacaaactgcctctttccttttgtactaaaactgatttcttaaaggtcacctgtgaccttcagattgtcaaagtcagtggccttttggcaggtcgcaaccaccttgaactctttgtttcatttgatgctattaacaatgcccccttctttgtattttctctacttttgctttccttggtaatacactttgcagattcttcctttactgtctccttcaagccttctttctcattttcttcatccctcgactgtaagtatactattacccacatttctagatgaagaaataaaggataaacttacccaaagttgaatgtctagcaagtggtttacccaggcctctaactccaaagtctatttctaactactatgctgaagttactgtgtctaaagttattaggaatctagaaccaccactaaaatgtatgtaaaacattggtgcagactagggaaagctgtgtttatgtggaaataaataggtaagaataagaggagcaggccttggatatgataatcttgaggatcccttcaaactcagatctcatggttcctcttttcagctttcttttttttctgctactccccaaaacaagtcttctatttcagccacaccgatccactacttttctctgaagacactgtgcttacctacctcaccaccgtgctcataccattcatttccctttcccagcatgctccccttcttctttcacttgtcaaagtcttatccaactgtcagtgcctagtacaagtcctaccctctataagaagccttctggatcatcttaattagaaatgttctcttgtacctctgaaatatatcggtcattaaattcatatcaatcacttgacactgattgtggaccaccttgaactattgcttatgagtttgtgtatatatatatatgccttagcttttcaactcagttataactcccctgttggaagggccccaactctcttagcagagatatggtgtcttacacaaaa

SEQ ID NO: 138999 - DNA, 1031 bp, Homo sapiens
agaacaaaaaaccaaacaccgcatattctcactcataggtgggaattgaacaatgagatcacatgaacacaggaaggggaacatcacactctggggactgtggtggggtggggggaggggggagggatagcattgggagatatacctaatgctagatgacacgttagtgggtgcagcgcaccagcatggcacatgtatacatatgtaactaacctgcacaatgtgcacatgtaccctaaaacttaaagtataataataataataataaaagaaaaaaaaaaagtttttctgtttcaccgtcattaatcagaacctcctaatccctgaacattccttttcatcagcattttaccattctgtagtatagtactcaaatgatggagatgcacttagaatctaattattttaagtaatgttgatataatcagcatcagaacttttaagctgtggcattaattcttgattatcagctgtcaggtctttcattacatgggttaaaagaatgagtcatctacccccatccaattaaggattaattcatttgggcgctcaaggtatggtgctaggcaccaagaatataattgtgggagggagggagagagggaagtttcctttttaggagagctttcaagtttatagggggaaagtttgttttaatttacttagaataatgtaattctcataaatatgtatgtgtttatctttgccacagccttaggtgtgttatcactctcttttacacattatgaaaccaagactaagagagaccacatgacttgccaaaaggtatcagctagtaaaggataaccaggatttgaatcccggtctgtcgggatctttccactatgccattctgtcttccatggaacttgttttgatcagtatatttcagaaagaaattccaagaaaagttttggactagtatattaatcatatttgactctgggactaatcaggtacgagaacaatcttcatttgtaaatggaataaacatctagtcttctttttaaatagtcttggtcatgatctca

SEQ ID NO: 139000 - DNA, 1036 bp, Homo sapiens
tttagggaaataaaaggaactcccaaaatagagtaggtggtagtttttaaaagcaagctgaatgcctgggagcccagcaaggaatgagtcccaggcgaagcagtgcccctggatttaggcctgtcaggaattctatagataaaatttctatagaaatagaagaataaactagataacctcaaaactttcttccaaatctaatatttttcagtttcatcatgtctagaaaaaatggtagaaattgcttccataagagatttaaagataaattctgtagtttgggtgaggattacaatatggtaattgccaatatttttatatttatgtcataattgaaatttcagcaataagaattcttggaattaaagtggtggttttcttttttagtatttaatcattttaatgggactagtttacttaaaatagcatttgacctgggtcacatatacatgacacaaaaaacaccctttaaatacctattgatttactgatttattggtttgtttggtcctgtcttatggaaggaatgaaacaaaacagtaaaagtagctaggaagcactggtgtcataggattttgctgtctctttcatccttcctcttgaactacaaatctttggagactgtattgggtattggatgatataaaatatgggtttgtgttcagcgagtcagcttactgagtgagatgtcccccctccatatgagatctttctctataaaaaaaattaggcctgaaatgttgtactgaattgtcatgattttcacatatctggatcatatatgaggtggatacacagaaagtacttgaaatctcagtcttaatttggtgccaaaaatctgtacatccatgtaattaataaaataactatatccctaaggttaccatatgggcctaaagaaagggcaagcataattataataaaatgtctataactgaacacctttaactcattagatttttttttcccctggattccttcaacttttagaaaaaggtacaaacaggaatgaaaaggttcaatgaggaaagcaggg

SEQ ID NO: 139001 - DNA, 1507 bp, Homo sapiens
tatgtattggtttgggtagaggtgaataaggaaagacaccatgaaggaaatagcatctgagataagccctaaaggaaggatgatattttgaacattgaaaattaagaagcaggtggaggagcagtgtgagccaaaggtgtggaggtaggaaagtactggatggattcagtgaatgctgtagttccattttgctggagtgccagcccttttgactcaaaatgtgattcccacaccagcaggattagcatcatctgggaacttataaaagcagaccacaactcagatttactaaattagaatctgcatttttacaagatcctcagggaacacatgtccacattaaaaagtttgagaagtattagggtagagcataagctggggcatagtgggagacaaggcctgaaatggatgcggcctttttatgagagactttagtgacttgaccaagtagtttggggagtcattaaaagttgctgaaggatcactgccaatgaaaattggtctatgacctgtatcccaccttgaaaatggtgacttaaagataaattaggctctgaaagtttgtctaccaccattcaagcaagccccttagtgcttccgaaaaggacttttccgttttctttctcacttcttcttcattacctttacttacccattatttgtaactcatacaattacccttgcttcagctaaaccagttagaatattgaactcatgaaattgacaaagtaggtttcatttgtttgacatcagttaagacctggcactgagaaatgttcaattgtcttggctgctaagccctgtggctgaagagtaatattgcggtccaactcttttggacattgtaaatattccctcagaagtagcaggtggaatggttgggtagtgagagctacaaatatggttttgaggcctagaatgaggaagcaggaggggtgaatgaaagtgaggagggccctccagagatggataaatccttcaacagcacctgccagaacattaagggcctggccattatcttaatcccttatttttccaaaagttttgaattgaaaacaaatttggagaccctcatctcccaacatggaatctcatatctgattttaaattgaagtcatttggaaaataagaattaggttatagaaacttgttttacagacaaattagctagactgttcttattgccaagtactgatattttttcaacattaatttatgtgttgagattgttgccttaatttgaatttatcagatttctcaagattttagccattttcttttaaagctaactaatccagggtggcattgtgtttcttttcgctagggttatacagtctctgagccacagctgcagataaaaagtggcattcactcacagggtcacattttggtattacaacctggggcaatcattaaaagtgttagattgcatcatgaaggttggtcctaatttgacctgatagtggacagctatgtaaagtgaattgtgacagtaactgttaaagca

SEQ ID NO: 139002 - DNA, 1110 bp, Homo sapiens
agacatttccattgttaggggaaaatgtgattctttcatgttggacagttcaaggtagtgatgaatatggtctcctaaacagaatccaagcaaagagcaatcactgactactcccgcattatttattcatgatttactttaatggctttgtgttattaagaaaaagtaggttagaagaggaatgcaaagctaacatcttccaagctgtaaatagactgtagcctggaggccgaaggagccacactactcaaatgttcttattccatttttgagacaaatttatataaaccccccattgggttagaagggcattgacatttgtttagtgtccaacatgtgctacaccttaaacatacaatctcttatttaattttcctcactttgctgtaaggggggcattatcatccccattttacaatgcagaaacagtctgagagagatcaagtgacctgttttatacaccttgtaagtggcacacttagtaagtggcacacctagtaagttgcagatgtggctttgaatgcagatctgactctagagcagcactgtccagcagaagtttctgggatgattgaaatgttatataaatatgctgtccaaaacagcagccactagctacatgtaactattgagcacttgaaatgtgattagtgcaactgagcaactgaacttttcactttttttctttctttctggttttgttttttgttttttgtttttttagatggagccttgctctgtcagcccaggctagagtgcagtggtgtgatctcagcccactgcaacctccgccacccgggttcaagtgattctcctgcctcagcctcctgagtagctgggattacaggcgcgtgccaccatgcccagctgatttttgtatttttagtagagacggggtttcaccatgttggtcaggctggtctcgaactcccgacctcgtgatccacccacctcggcctcccaaagtgctgggattacaggcgtgagccactgtgcccggcctgaacttttcattttattccattttaattaatttaaagagctacatatggctagtggctactgtattgcatagcacatctccagagattgccttttcttttttaaaaa

SEQ ID NO: 139003 - DNA, 1037 bp, Homo sapiens
agccaggagggaggataaaaattttgaatatgtaaatgaagattgaccatatttatgtggttctatctttagggaatgctaaaccacaaactcatcattggttaattagaagataattaaaattgtagcatagtgattggataaatagttaatgaaggctgaataaacaaagaaaggaaatctggtgaaattggtgtgtacattttgggcaaagcaaagatacaaatgttattcatgcggtgcatcagtcttaaaggataccagtatccttctagcattaactgataaaattaactctccaaagaccaaaagaccagctctcactttctccttcaaaacatcttacactgaaatgcagatttatttgacagcaacttcaattttcattcactcacagcatgtgaaattattttgctgaaccttgtttacaacttatttactggcatcttaataatctattagcagaaattggtgttctctgtgtgtagtaactgttcctacttaaagagctggctcagcctaggctcctgaccagatctggctgacaagctagttttcaaaaccagtgaagtggtttctgcagggagaactgtgcttgcttttgataattgcctcagttttatgaaatcaatcagcctgaagggaagacctcattacagatctgacaagatagactccaatttcaatactagaacaactctctgtcctcaggctctgaaatctgcaattatttattttatttagacagagacaaccataatagagtacctctgggcacattctcagggaagtactcaacagataacctaatggtcagtgtgctaggaacctgcccttttcctgtcactcaggtggaaaattggtcaacaggaattacagcatggcctagagccagctcaaagcagacactgatgaatcaccatctttccaatcccctaccccaaaagatgtggagagaaagggtagctgctgtaactgttcccagggctaaactacaacaaaataaggctttctcttctcagttcctctgaagactg

SEQ ID NO: 139004 - DNA, 1050 bp, Homo sapiens
tactatgttattctgcctcttagacaattatactttttttctgaatgaattaatatcttttgacaagctttgttaagaatacctagtaaaggtcaagtgtaagccatttactgctgtttcctggcagcctttatgccatggtaaatagagattggaagcagttttatttttgagcatggatttatggatatgcttctattggactgtgctttttctcatactgaaacccacaaatgttgcaggattttcaggactgtggcttaagaattttttcatggagtcatctcagactcctctcttctcctcaactcccagatccaattatacatgaaatccagatgattatatttcctgaatatctctgaaatccattcattttttttcatcccactgccactgtctgagttcatgcgactgtcatctctccattgtatcattatggttttcttctaactggtctctctgcctctggtgtcttctcaccttcagtgcatccttcatcatgccataggagtggtctttctaaggcacaaatcagatggtgacagccccccacccagaacacacacatacacacacacacacatattagaatgaactctaagatcctacaataagtcgtctgataaggctctgtgtactcctgtggagagagcttttgggggttaggtaaaacttcactgaagaggtgacatttgagccgagttttgaaggatgaataaaagttctccaggtggaaaaaggaaaagttatatgtcaagcagaggagatggtatgtgcagaagcacatagacatgacagggcttagcatgtttgaggaattttgagaattttggcatgaatgaagcaaagggtacttaggggaattggcaagagatgaagctggtacagtaatttgggccagattttctttgtatgtatctgcctttctttcttttgttgtcttcttgaggaaaaaaaactatcatattaaatcctaaaattctcaagccttacatactgtcaaggcacccagaattgtttgaatgaattggacaaataaagagagag

SEQ ID NO: 139005 - DNA, 1040 bp, Homo sapiens
tcatgccttcattatttgtgaataaaaaatgtatcatggcataacgggcttcatccttgcataactacaaggaattctaatacagacaaaatatttttaccattgcctttgtttatttaaatactaactttttgagcttaatcaatgttcagtttgcttgaaagaagtctcttgtccagaattgcctgcttagcatgatggtttcctcacttcttgtttttaataaatcatttctaaataattaactaggcaatagtacaaactgaaacaatggattagttcttcatggctcctagtaattattaaaaatgcaactctcctgttgactaggacccctaatagagaagcctgatccctggagtgttagttgggagaccaaactctgccactggcttgctgtggaactttaaacaagtcactttagcgtctctgagctttagaattccgtattttaactttgtaataatgccttctctggtcacctcacaaagtagctgtgaggtggatgtgaagcaaagttgaaaggataatagcagtctctgaatataaattattgttgttaaaataataaagtcaagcatttgtttagtcatagcactaaacgaatgtttcttctttcgcggctgcttcatgtttatctgcatcttttctgtaaaccccagcttctcactgtatcaagcaagacaatatatttggtgatacagttcacctctatgccgaagggcagaagcaaccattttaaaaaaaataatgtggcttgctagaggatatctgggaagcagcaacagatgaattgccattttgagccaaatcattttgttgaccacaaggcagaacagcagcaagctcagatgggagaactatagtcattatccaaaggtcagacttgataagcagactctgctatttcttcctctaactcccatatgtctggaggggcatgtgggcggcagggggagccagaaatctcactgtcaaaaaagtatttaagtgattttctgcaaatagaactgattatattctgtgtagaataacaggat

SEQ ID NO: 139006 - DNA, 1300 bp, Homo sapiens
ttttgcttggaggttgtaagaataaatgaaacatggatggaaacagtttgagcataaatacataaatccgaggaattatgactcttcaggaattatttatgtataccagtatttgtgtatttagaaagcccctcccttacccataaacacatgcacacttcaccatcatcatcaaacttaaagagacatgcacacataaatcctcatgttttcaaacatactttttttcctcattggcttttaaaaaatggttactttgaactgtgtagaattggatggacattaatatacttttatctggctatgtatctatttatttattcattaatatagtcaacagatatttattaagttctactatatgccagatactgtaatatgctgggggaaaaatataataatcaagacaggaatgactcttggctcatgagcttatggccaaataaggaagacaacagactctttaaaaagtttaagtactgtaatgggggattgtcagagcatagtagagtacctagcagaaccttagatgtagagggtagaaaaggtagaaatgcttcccacagaagtaatgttcatgctgaggcttttagagaatgagtaattgcaacctagcaaagagaagtggggaagagcattccagtcagagggggcagaatcactgcaaagttgtgcagtaatttggtgtgtatatctatctacacttagatatcaacccatttacaggtagctgtgcctctgcctaaacttggagaaactgcatggcttttcagaccttgtgaattgttggctttgtccctgaatacactgaatggatgaaaccctggcctagcatgaactgcttttgctcgttgattacttttctaactcataaaagtcaagttctcaatcttgaatgttttttagaaccttcttatggttctgagtgttgtttattttggttatcccgactgcagataattgtgtatttgcactgaccatgaatttagatgcttttaacaagtttctgcattttggctgggttagttactctatttagtagagttgtgtccatcaacacacaggctgttttatctatccaagccccaataagtgagtataatttcctgatattaacatagactcagaaaccactggtctatgtgatttgaataatgaccatttatttttaaaccattttaagaccatataaatcactttctaaaattagttgaagtcatttccttcccagactttctaggattttcttccttcactgagctctagctactaacaagctttcagttgtatatgtttgaat

SEQ ID NO: 139007 - DNA, 1066 bp, Homo sapiens
tcaggaagagcaattatggggaaattgaagaaaaggaatggaaagtaattgcaatttcatgtgtgcccagattccagtgcactttggaaaatcccctccgtatctcagatgagttgcaactccaaatcaacatgtaaagcagttattttaaatgtgcaatgctaagactcaagaaagtttagtacctgctttcattctagggtgaaaagaaaattcagtgctgtttgtgtgtgtgtgtgtgtgtgtgtgtgtgtgtgtgtgtgtgtgtgattatacatgaatacttatacttcagatgacgttattaaaacatatgtgtctttcttatgtttatctggcccaccagttagggagttatatttaggtatgtaattcaagatttcctcacacctaatcccaaagcatttgagcataaccaacattttgctaaaagggggtggtgtgtgaaggcagatatgctttctacaggatgaaagttggaatttgagtccctaaaggtttatagacaggcctaggagacccctgctctcaaagccaggaagtaaaatatcatggacagtatttttaatactagggctagatgtgtaggatgtgaaactagtacaggaaatttagaacaagaacatttggcaaccttgtgcttcctgtctaaaataaccattatggaacatcagtgggaggtggtaggctatagtgaattttaacattttttgtattagactgccatactactgaacttttcatatgttatagatttttttctgttttatttttgctttttgttcttagaaaagtcagttcccaagtggggtgtgtgtgtgtgtgtgtgtgtgtgtgtgtatgtgtgtgtgtgtgtgtgtgtaagggaatatctatatttagtatctgcctttaggtgtatttgtttccagagttacttctttaacaactgacatggtattctttgggcaagtcatttattttgagcactgtaagatttctgatgggagtgctgtaagctccagctctaaattgatgttgaagaatcgataaactacttagcagaggaataaatggcttgaggaaa

SEQ ID NO: 139008 - DNA, 1098 bp, Homo sapiens
aaacaaagtctgagacttttattattagaaacatttttattgacctaacagaagcctttgatttagtcacccatatacagtttcttcagaaatcccgtgattctggatttagcagtgaccctgtaaaatggttttctctccatttagttcttgccaacttagcctcgacctggaggtccaaaatacttgcagactgtcatttttagtgaagaataactgaagtctttcgttggctgatggtgaaggagagttcaaagactacgctggcagctccatttgctatcacaggaagtttctccttttgaaatcatctccctctttctagcagatctgctgtgtcaagggtgtgctttttagcagaatttattccttgagttgctttcggtgtaagttatctgcaaaggcaaaacattcatggtaatttatgtgacataacttatttcagtagagtaatagaatggtagagctaaaggggatgttatggaagcttctgcttgatattcttgttttatagatggggaaactgaggcacagaggtgttaaattactcacctgaagccatacaaactagttagtgtcagagcctagagtacaaacccaggcctcgggactcctaatcaagtgtttttttctaatatgttatgctgctttctgcctagctaattcgtgtagaatttacctatcataatatacatacatattacatgtaaataaatattaaatagacagatatgtatgttatgtattctattggtggcaacataacctagcagttaagagcagacatagatctgaattctaccccttaatactggtgtgaatgtatacatctaacttaatctctgagcctcagttgcctcatctgtaaaactgagacaataagagtactcactcacctgttaaaattatgagaatgaaataagaaaatgcatgtaaagtactttgtaaactgccttgtgcatagtaaactctctgtgaatgatagctatttttactatttaacttttttctatatagctcattcagttccaccccccaccgcctcccctccccaggatgagaattcccttggaaatcttaattttattaagctagcat

SEQ ID NO: 139009 - DNA, 1095 bp, Homo sapiens
aatactgtggacagaattcagaatgcattgattaaggagtggatgagaggagaggaagtggaagagcaaatgcaggccacattcttccaagggggtagagtagctgagtggggtgcctttggttcgtttaaggatggatagggcattaagagtttcttttggtattttctttgaattaatcatctcattttctgatttcttatcataaaaagaataaataagccaaaggaatcagctacataagaaatgaagtcttgcatattttcagtgcttctgtctgatattaataaatgatgaattgtggttttaagtccctatagttctatatcttttcctcagctttgcttaaagtgtctatctacccagaatccacaatgcctcaggcagtactaaattagcactataggtgtattaaggccagcctggctggggtgagcacggcattacggctggctttagacccttggttgaggagccagctttgtaatacccaacttagtaattatgggggctttatgtttgcatgtgtgaaccttagttaagctttgtcatagatttttcaaaacagctggggcttttggtctatgaagacattaatttgtgtctccaggggctatgcataaatcaaattggaaaagaggggaggaggagcgaatttctttttttgtgtgaatcccagctccctgttaactgtttaattgaggagaaggaaagagtcctgtgacaattactgaattagtgatgcactattatcttcttcttgatgtattctagcttgatgtatttatgttaaaaagacagtaaatgctgtctcccatagaaggccctgctttgttgcccttcaacagaaatgtagactcagatttcacagttcctgttgtttcaaagggaggcttaatgttggttggtgatggttgttaatttaaactttagtcctcttttcttaaccatctgctgtgtagtggctctcagtcacagttgagggacagcaacaaggatcccacctggggaaagcaaagtaataacataggcctttggaaattctgctgtttattcctctctagccctgtaaaggattattgggaaatcatgtca

SEQ ID NO: 139010 - DNA, 1115 bp, Homo sapiens
ttgtagaaacaaatcttacttgcatgtacaatgttagcttagcattgtaaaagattgccggctgggcgcagtggctcatgcctgtaatcccagcactttgggaggctgatgcgagcagatcacctgaggtcaggagttcgagaccagcctgatcaacatggaaaaaccccgtctctactaaaaatacaaaattaggcgggcgtggtggcacatgcctgtaatcccagctactcaggaggcagaggcaggagaatcgcttgaatccgggaggcagaggttgcggtgagccgagatcatgccattgcactccagcctgggcaacaagaaggaaacttcgtctcaaaaaaaaaaaaaaaaattgccacatggagtgcttctgtaatacacataagcactcttgcttttctggtttgtggattggataaggaaacagtggattttcttaaagtagggcacacctatagtctgtattcccatataaagtttttaatttcaaagactgacccctttgttagaccctgatttctcaacctgatcttccgtagtctcttgtggtttcttcctacttcattagtctagtgactcaggtgagctttcctgacccctgatctctgcctggctatcatatgttatactatatgaaaatataatgatatatttgtgtatttataagtgagatatagcaggaatttgtataggagccctacaaatatatgtgtttttctatcaaagttttatgatattcaagaccagcaagcacaatgcacgttgtgaaagttttctttttttctgtacattactacttattttaaatattcttgttttgcttcttaaccttttacatgatatactaactctatccattaccgaagcataaccacttctgaagtgaaatgacatctatctaaccatgttaaaaatagtattggttggccaggtgcagtggctcatgcctgtaatcccagcactttgggaggccaaggtgggcagattgcctaaggtcgggagttcgagaccagcctgaccaacatggagaaaccctgtctctactaaaaatacaaaattagccgggtgtggtggcacatgcctgtaatcccagctactcaggaggctga

SEQ ID NO: 139011 - DNA, 1428 bp, Homo sapiens
tgtaaataccttggctttactttgagtaaaatgaggagtccttggagggttttgagcagaagagtgatataatgtggtttttaaaaggattatgctggctactgtcttttttgttgtttaaaccactttattggtataaaccactttactggtatatgattgacataaaaaagctatatgtatttcatgtgtacaacttgataagtttggagataagtatacaccacaaaaccatcaccttaatctatgtcattaacctatcaatcacctccaaaactgtcctcccaccctcttatttattattatttgtgtatatgacaagaacacttaacataagatctacccccttagcaatttttaaaatacaccatacagtattgttaacttataggcactatgctgtacaatagatgtaggccttactcatctggtgcgaccaaaactttgtaccctttgactaataccttcccatttcactctcctcccaggccctggaaaccctggtattctactttctgcttctatgagtttgactactttatattcatcatatagtgctatcatgtagtatttttccttctgtgtctggcttatttcattatgtcacttagcttgacattctccaggttcatccatgttgctgcaaatgccgggattcccttctttttaagactagataattgttctagggtgtggttggttgtgtgtgtgtgtgtatgtacaccaccttttctttacccattcatctataaatggacatttagattgcttggctattaagaattatgctgcagtgaacatgggagtgtagatatctcttcaagataatgatttcagatcctttggatttatacccagaagtgagattgctggatcatatggtagttatatttttaattttttaagaaacctccgtattgtgtttcaatatacattttcactaacagtgtacaagagttgcattttttccacatccttgcctacatttatcttttgtttttattgttgttgttttgataaatggtcacccaagcaggtgtgaggtgatacctcattgtggttttgatttgcatttctctgatgatgagtgatgttgggtaccttttcacatacctcctggtcatttttatagatgtctgtttaggtactttgctcacttattattattattttttgctattgcattgtaggagttccttatttatttgtgataataaccttttatcaaatagatggcttgtaaatattttcttccattctgtaggttgccttttcattttgtttccttctctgtgcagaagctgtggctatcttaaaaagagattacaggtgtatgagcaaggtggaagcagggagaccagataggaagttgcttcagtaatctaagcaagagatggtggtagatggaagcagggtggaaactgttca

SEQ ID NO: 139012 - DNA, 1765 bp, Homo sapiens
tacatagcaatgactatgttttgagcttggactttgtattagttatcaactgccctgtaacaaattaccctcaaacttagcacattaaagcagcaagcattatcttacagtttttgtgtgtcaggaatctggaaatggtttagctgaattcctctgccttaaggtctctcgtgagcttgcagttaagctgcaactgagcctgtggttgaatccgaaggcttgactgaactggggagaggatccactttcaagctcgggtggttcttggcagacctcagacccttgccacacgggcttctccatagggctaacccatgaaatgtcagtggctaccccagagagggtgattcaggaaagactgcccaagacagaagccagagtcattttataatctaatctcaaaaatgatatcccatatatattaaactacatatatgtaatcacatttatgattataattatatataaatatatatacactcacacctatatgatttttaaagacacatatttactaaaacacagtctgagaagaaaccgaaaagccaaatgagaaaaagaggtttacatgaagagataattaatcttcaagtgactcttacaactacaaacccacccagaaagacagaagaaaatgtttgacattaacaactccacttaaatttcaatacttttattcaatttatgtaagttaatgtgaaataagatactaactacagttaaatgtagcccctatatatgggttttagtgcatatttgaagacagaaatagaaaaaagtagactaaactggtaagaaattgaattttaaaaacaggtattatagattacctcatagttcatatttcctcttacctttacttctattacattttagtttagtaactgaaattataagaatccgcatttttgtagaatggtaatttagtaggaaggggaacaatgctgtcttgcagcagatctttaaattcaatttttaactaaattaatttcatgaggtctaggttgttctatctaaatccaaaaattataggtattcatttagattcataaaccatatctcatttactcaaaataaaagatataaccctgtcttgtctacagagagtaagaaaggattaaggcaagagagaaaagtgttttattcatcataacaacacaagatgcctatttgaaactgaggaaggagaagatatgtataatatttagaaggagtttatgtgtgtatgtacatttcaaaagggatacacttctgaaatagtcatttctcatttggaaagacagacatctgtgtgctcaaaaaggaaactaataagtgaaaaaggaagagtttggattagcttatgtctgaggtcccacctagctttaacattctgagtccatgtttagattagacattggaggtataaatcttatttttgttaaggagaatgagaaaacatgcataattaaaacctgtagatcatccctaaacttcattttagcctaagctttataagaggcaaaccaaatgtgtttgtgtttgtggtgtgggtgagttttcatggtatcttggcttagaggtaatgggagagggtagtgctgtgtaccttgcaataggaggtataccttattcagtcttttgtgtcctaccaggaaatgtagataattgctttacagacataaaccacttttgtattctctgtagctcaggaattggtcagagtaagaaggaagctgtgattagccttccctgtgcccctcagttattcctttcaaataggctt

SEQ ID NO: 139013 - DNA, 1590 bp, Homo sapiens
tgactggatgaatagaggtatcaataccctagatgagaaagtcaggagtaaatttgggagaaaagatgaattacattgtgggtgtattaatttggaggtatctaggatatcagtaagaaataaagatctgtgggtcaggaaataagtctgcattagagatatagatttgggagcattattagtttataggtggtagctgaaaccatttatgtggattatatcactcgtatagtatatttacaatgcaaagagaaatggtctgagcccaataagaaaccagtgaagtgaccaaagataatggtaaaagaagaaagagtttcaggcatagtgtagaccagtgattctaagtgtggtccatgaacaccgggggctccgagcccaagattcttccagggagtctgagcggtcaaaacaatttaattctaatatgttatttgtctttttcaccatgttgacattttcactgatggagcaaaagcaactgtgggtaaaaccactggtaccttggcggaaattaagagagtggcaccaaattgtatttgttagtaattatattctttattttgtttagatataccacattttgtttattcatttattgattgatatatattgggaatttctcatcttttggctattatgaataattctatgaaatttgtgtgggcatatgtttttatttctcttaagaatatacctaggagtggaaatgctggatcatatgtaactctatgtttagtcatctgaggaattgccagactcttccaagtaattgtattctttactgctgcacactcacagttaagaaaaaaagccattctcagtaatgtcttttataagtcagtaactattattagtttattacattttgacctttatgtacatttttaaatgttctatgtatcaaatgggaagaacacataaagcacttctgatgcatactgaaggacaatggtattcatccttcaataaaccttgcatcctcctatgcaagtcttaaggtaaagcatttgtatggttgagttgcaaactgaactagcagctttttacataggattccaattttacttgaaggaacaactgacaaactatggctattctgtgtcactgggtatttggcagtaattttctcaaaaataaagtgagcctgtgactttaaggaaaacaactggtatttcttgccaatgttaaaatttagaattagaattttggaacacgtatctgccaccatgagcttgagagtttaccaatgctaatagacttctatgatgaggccagtcatgatgttaactaatttgagaatattgtgtaatgaaatgtgtaacattggaagatttgcataactcagtgaaccaatatttgtcaaatgatcaatgaataatgttgtaaaatcatgcctggggaaaaatccatttaaagtacaagactgaccagtggttttaatataacaaagccccaaaagttcattaatatagattcagatttcccatttcactaaagaaactgccactaactgccactgttaaattttgatgtagtattaaagaataatatctacaattatctgaaaagactattcaaatgttcttc

SEQ ID NO: 139014 - DNA, 1974 bp, Homo sapiens
atgtcctgaatggtattgcctaggttttcttttagggtttttatggttttaggtcttacatttaagtctttaatccatcctgagttaatttttgtgtaaggtgtaaggaaggggtccagtttcagttttctgcatatggctagccagttttcccaacaccgtttattaaatagggaatcctttccccatttcttgtttttgtcaggtttgtcaaagatcagatggttgtagatgtgtggtattatttttgcagcctctgttctgttccattggtctatatctctgttttggtaccagtaccatgctgttttggttactgtagccttgtagtatagtttgacatcaggtagcgtgatgcttctagctttgttctttttgcttaggattgtctttcttgcttccttctttttctttccttccttcattgcttccattagcatgatgatctgccatgcagaggtaggttaggaatgaaggtaagtaatactttgtaagtattaaacataggctgatgctgaaatcaagtagagaagagatatgccaccatgcggaaacatgcaatattagacatagggagacatagtttgaaaaagacttctcgaagattctgatatgatcttcagtgagtgctataccagcctagctgaaaatcactgagataaataaaaatgactactgtttcatccatgagaattttttaagcaaccttaaataagttcctatagcttaatacgtgcttttgccttacaaaataaaacagaacaaaactaatgctgaagaaaatagaaacttacttagaacaacttgtcagatggtttctagtattagcaatttgctatgtccaaaaactgaggagcccaatgaggtaaagtagttcttgcacataaaaggaaaggcatttgctacccccagtgatcctgcatattgtaagctctagcagagtgggtggggaaggaacaccattgtctaaaatggacaaatagaagaaaaagtttctaagaggtttgcccagctttaaaaatactttttccacataattaaactaattagagattctgtattgattcatgacctcctcttttaagatataatgtctcatggtgaggttaacccttaaccatattttagcatcaattacttgaatcaaatatctgcatcgattcctaactgaggtttctgttcctcggtggcttagaaaagaaggtgtaagggagatgtgtgcatctccttatctctttctttacctgtttgatggtattatggggagggactttcaaaatgcttttgtgggaaagaactctagtgttgggataggataaaggcacataatattagttaatttgattgtttgtcctcgcccttcacctttgtaaatcgtattcaactcacctgactcaaatcctgtacatcacagaaagcctcctcttcttttgctagcctacattgattttccccttctttgaactacagcagtatttattgtctgtactacccaatctaatgtttgattgggcgttatatattctcctgttctttagtgagtttgtatgtgccaaacttgttcccccttatagaagactagtgatttatatgtactacaaatgactgttgggaggaaatgattgcaagttctttaaggcaaggactgtgactttcttattcctttgtttagtattctccatggcatatagaacaatatatttggatttagggaaaaatcacctttaattactgttacaattaagatttcactcaatattactatctaacttaaaacatgcaaaatttacaagtagatactatgatgcatatgttatacagtaatggctttagtcacttggactaaattggcagtattctttcccttctttgcactagccttagctcatggtactggtggtcattcctgatggccttgatactggctctttctcataacgactagtggaagcatatagaaatgctatttgatga

SEQ ID NO: 139015 - DNA, 1061 bp, Homo sapiens
tgttgttgtgttttttgttttttcttttggatcctagcaagatgccttttgataatggaatagaatgttacaaataggctttgtggcatttcatccttttagatgagcttattgagattttggagttacagatgaatttggcctttccacctgaaaagggtattatcttttatttcattgctttccttcttctgtatctcattcccttgcttcgcactagtttctgcatttgcttcttcttggttattaagctatagttccacatgatttccatagttgacccattcccctccactgttgtgattacctgtgctgccaaccctgtgatgatggcttattggcttttgccctttcttcccactctttactaccaaggagtcaattgatccgcagaacctttctaattccctcacactctatcccctagatggtgtcaaaagtgtcaggtcatgtgtttttcaattacagatggaacaaagtatttaccaagtggttttctaggacatgacaaacacagcctggcacacttcttagttagagtatggagaatagaaagctagtccttaagaatgaagagcattcaatcaggatttgaaagcttagtcaagtagaaagctggtactgtatgtgcctctagcttttaaaaatttctcctcgcttttcttctttttttttgtttgttatactttaagttctgggatacatgtgcagaacgtgcaggcttgttacataggtatacacgtgccatggtggtttgctgcacccatcaatccatcatctacattaggtatttctcctaatgctattcctcccctagtcccccaccccctgacaggcccccgtgtgtgatgttcccctccctgtgtccatgtgttctcattgttccactctcacttatgagtgagaacatgtcgtgtttggttttctgttcttgtgttagtttgctgagaaggatggtttccagcttcatccatgtccctgcaaaagacatgaactcatccttttttatgactgcatagtattccatggtgtatatgtgccacattttctttatccagtct

SEQ ID NO: 139016 - DNA, 4160 bp, Homo sapiens
tccttttacatataggacaagcatttctttttatggataatttaaattttaaaaacggcctaaagtgagttatcctcagaagggatttgacaaattatgatctcaactaaatttaaatgcgagctgcactctgcatttctcatcagtactgtttttctcatattggcttgctgttgagggttggctgttaagtcttgatttctgagctagggataagaaagttgagttaatcagaagagctcctaccttcaatgtttatgtcatagacacttttatacattttagctctcatagtccctttcactattttcttttggattgttcaaccccttagccactcatgactcacaacttttcagcttccatttcttccgcgagtaaatcttttttgaaccagtagtatattcctttcaggactattttgttatttaaaatagcattaatactttggaagaagttgatcagaaatggaatgtagtctgtacataaagagatataaatgtaggtccttttatgttttgttattgtgtggagttcatcaagtatattagttgtacttggtggctttaaaaagaacccagtgtcaaatttctaaagtactgggaaaaaaaaatacatggatagagtaatgtccttgactattgttatctatggaaactatatggtaagtaactatgcctgctggacctgccctctgttgcctagatcccagttctttgtatacttttcaattgctaaaatttttagcacatcctgaaattcccttctttctctttccattcttcactttctttggctctgttttctgtttttaatggacagcaggcatcctccccagcttttttgtaccattcaaactcactcccagaattcattgttgtatccaacctcactgaactgcctagaggagttcaaaacgggtgtttcaaagtgcctctcagggccaccctggagcactctgcatataggttcttttgttttgaggactaaagagacagtatcgcagctacagttttgagaaatgtgtaaagagaaaacccatttggatctaaaggaaaattttaacttcttgcctctcccttcccccagactacatctacaattttcagtgacatttttactttgtttaggaaaccagtcatttctgctttcagtaaaaaaagttcactctgatcaggatccttcctaatttaaaccagagtagagaagaagggaaatatgttttaaaggtatgctataggactatgctaagatatttacataaattattttatttaatccttgttagtactctcaataaatgataaagaagttgttcttcttagccgagactatatataccactaacttgtctagagctctgtctccagaaacactgctcttagaaagcctgcattcctgttgctttttacttatacacataattgtgaatggttacctattctcttactctgtttctctgtgggtatgggtgttgaagagataagatgggagggagggagggatggagggagggagagaaagggagaagggaagagagaagagagattatcagtactaggatgttccctcataaaaatcccagatctgcgtaaaatgggagaatgtaaagaaaacacttcctgtgctagctgtgtattgaacaggaattgggatgtgttttaagagggcttctgactaaggggttgtaaagaaagccttctttagattctttatacactctacttattgccactcgcttgcccagcagtctaagagactgctgactcttgctgccaaacatggttggcattttcccaaaccttgaccgtggggtttggaggtggaacaggaattgcaaagaaccacaagccttacacactctgctgagtcatggaaatttgcccagcttattcattggaagttgtacaatctgcattcacctcaatttgtggtaaggaatatgaggaacgtaaaataattgtgacaatccatatttaataaaaatgacaataagctgcaagtaaatcagactattctggaaaggttttatgggtggcattttacatttcgtcttggttataaatatcaaacaaataaatataaaacatcaaaagtaattttgattcatgcttttatacatctacaagtgacaggggatagtaaactatattaagagtgtgcaatgtgatacatcattttaaaagccaatatggttttgagtaactgacatggatatggacaaataacttagagcatagtagtgagaatccctttttaattggtagtaagactatgcccaagtttccattctctggaactgagatgcttgaaatggaaaagagcaattgaaatgcttaaggaatctagggagagtggtttatgaaggtaggacacaaagtaaatatgataaagacagcttgagtagttcgtgaatattggcactcacggctcttttgaatggagtgagcaataaagagcatagtctcacggaaaaaggaataagcacaggcagaaatatgaccactggagggatgagcctggaattccagtagtgtctctccccatctcaactagtattccctgagtgccctacccatgggctttgtgaggcatttaacaagaagggaaagaaatggtctgagaagaaatggtttgaaggaattgaagtgagaaggacataattgttttgtcaaatattaacagctagttaaaataaaaggaaaccccaccccgaagcaaactctccagaacatttctttggctggcctcacattaaggccagatgaagcataagctgtagagaagaacctcactctaacatggaatatgatctaaggcaatgcccttcttggaccatctccacatggatttattactggaagtaacagaagggctatgttagaacattagaacacagttccaaggcatgaacactgaggttgggatttatagtaaggctctggtgtactagctggacaatgagtacaatttcattgcagatgttttccattggagatttttgacatgtcagtgagccaggataagtcagccagcactacttagctagcacctactgtattgtgttgcctgtacttgaccaatccagtgagggaagtatttgaagctctttagccatttctgatcctcagggcactattgataagctgcccctcccaggatagtaaactgccccttgctgttgtgaaacaggtgatggataaacagcttttctcatagtatctgtacttctctcttttcagtatcggaatcattcccagtaaagtgtaaaatggagtagacgactccccatgaggttttaaatctagatcataatggaccacctgccaaatgctttccctttatgatcccaagttaaagttattgacagagagaaaagcattgcaaaatggagtgccagtttcttatggcattcatggacttaagccaaaatatttaaaacgctcagacaaatagttcattcaggagctttggaagcaacttgtaaaaatcaacagcctgcctattccatatctggggaaaggacagaagagggaggaaggagataaaagagtacggaatgatttgtattcattaactattatcagtgttaagtacaatgtaggatgttgttcttactaacatttacgaaatgctacccttaaacctgcagactaaggaaagagcaatccagtagatgtgccctttgctaaatgattgagccagaaacagcatataaatattagaaatggcttaaaccacagcatcaagttttattatttcgtataataatacgactattgggacttatgactctagtgggaatatgtaagtactcatttatttccagctaatgagaaaattattaagaaagagaaaagggaggtttatagataaaagttcagaaggattttgtaatataagcattttaaaagaattttatggttgtaagaaaccttaaaggttatcaagtcattttccctcactccctttcatacataatctattccctatatctactccatcctcaagtggtcaatccagtttatgcttagatactcccaataatttaacagtctctagtatacggtaggaaatctgatttttgaatagctcaagttattgaatgtttgcataaataagccaaaatctcttttcagcctctattcagctcctactct

SEQ ID NO: 139017 - DNA, 1026 bp, Homo sapiens
caaactaacatttattgaaagcttgctctgtgccagatcatgttataaataccttatatgtatgaactcatcaacgctcacagcaatgccataaggtagacagtagtatttccattttcaggttagaaaaacagatacagagtttaagtatccagcctaccacgtcacacaattactaagtagcaagaatcaatattggatggcaagtttgtcttcagagccaatgctcttaaccactgtggagtatgctgtatgtctttaggggttctttattaaagaaactgtttgcccacctgtgtgctacccggagcagatatcccattgttcatgacttcaaaagacctagacagtgtagagctgtctgctgaccagactattaaaaatttttactttctttccaacccccatcgttggtagtctttactgacaaagtgaaggggaacattgcatccccaggaatttctaaacattgctactactcatgttctttcttcagattttcagctttgcttttaaggtctctttcataatctgttgcttctctccattctcagctttttgcaacaagaaacattgacagccaaagtgtaatttttcttccatgcagccaaatggccaaacatcacacatcttctctgtgtctactctctcccgactccattttatgcctaactgttagaatgttcttcctaaatgcagatcttatcctatcactcctctccttaaaaatcctctaaaggattttgcttttttttttttttttccaaatagacattcagggccatccatagccttgtcccaggcactcagaattcccttacactcttatctcccactacacaacgctctctatatcttatttacctgccactctagaccacttctgggtcataagtacaccccaaattttcaagctcctgtgcctttccatactgttctctacatttcaattgccatccttccttatctccagcgatcgtagagctgctcaatatttaaggttccactcaaattatacctgctact

SEQ ID NO: 139018 - DNA, 1064 bp, Homo sapiens
atcttttaaaatttccaaatggtttctcaattttaaattaattagttttaagggaaaaaatgctttttgtcccactgaagaaaggaatactatttaaagccacattatcaattcatcaaatgaacccaactacttgaatggctcatacaagctctctggtaaaactttctttaggaccccttcagtaaacattcttgaaggggccatttttatatctgaatttattagagactgtcccgtgtactagattaatgactcgatgttcacgccatagacaactcttcttcagcatttgacaatgaacatttgagaatgttgataagaaaatgggccagagatagagcaagtattgttataatctgtttatgagactttaagatggtaatgaatatattatctcagataccatgtaattggaatttacccttatctaagatggtatctttatattttaacatgtcttaaagtaaatctgtcctcatattatttccttctggcaaaaaagaaaggaggatgatatgaagcccttttatcattctttagacttaaatgaatttgacacttaaaaaatacaggtgggaacttcggggaacagatcaggattagaggaaggagaactgggcaaactaggcatgaaattggaagttccatattaaacttggtttcaggtggcaaatgtcctacgtagttggaagctctggctaacatccctcactgtgttcctttttctaggaataggcactctgaatataaatgaaaaagaatttattggggcttttaaagaaattgacattttcttattggctaaagaaaaagtctttcatctacaaaatagttactttttccttgtcttgtttgaggccaagaaaaattcaagagggagatttgtaggttctggttgttcagggagctgaagttgagtcgtctgatggattttcctctttggtacacctatgagcgtgttttagaggagtgaagggcaggtctcatggacgggaatataaaggttagtatacaccagtccgtggtgtgctggagccagcttgcactagcttatttaaggg

SEQ ID NO: 139019 - DNA, 1040 bp, Homo sapiens
aatattatgctcctacgcttaacagctaaaagatcatgttctattttgatgcgtggtttgacagttgatttcgctcctcattaattggacagcatgcagatgatgtggagaagtgagtgagtgacaatatttcaaggttacgttgaagagcatacagtgaaccttagtgcctggaccaacagctgctgaattgaattgtctgcaattaaagcaacagcaggtttgtgtagtctccctgcagcccatttatttgaatttatagcttcagtttcttctttgagtattggttggttggttctgctaagtgttggaaagttgtgcttgctggatgttttctctgtattccaatgcatgcttgactctagaagagccttctgtgtacattttaatgtgagaagttgttgaggcttttttcttacggttaaaaccagagattgtcttattttctccactataaaattaaatagatttacatggaaaatattgctttgttgaataaatagagatttctcatggaccagtgttactggtttaagtttctggcaatgaaaaatgctggactttgttatgctactggaattactatatctgggaagaacttctctctgctaataaaaatgtttacattttaaaaacgacattatctccttgccagctctcaattccacagtgacctaatgaataatttcaaatctaactaggtggcttttatgactgtattttatttgtatgctaatagtgaatacatgtttaattccttaatggttttactctattaaaaattacaatattagtgtagttgttggttactgaatgatagtggatgtggtataaaacatttagacagtgatttaatatatactttcttagttcattctcagtaagtgtgaggtcagtgatatgatctccattttataggtaagaaaactgagactcaggatgagtaactggcctgaggtctccatctaagtgcagcctaaacttacaggttacattatctgattaaagaatctgtgctttttcctccctgatatcaggct

SEQ ID NO: 139020 - DNA, 2481 bp, Homo sapiens
tgtttgagggcacagatagcactggatgggaccaagaggagctgacatctgatatccctgctctatcccccacctttcttttggctgcttcagatttggttcatgtggacaaacacacttgggaaccaccatacagatggaaatcaggacatgtgggatttggctgaaccaaagatccccaaacattgcctggatcatttagtgccccaggtgtggccaccccaggacttcatgtgctaaaattgtgtcccagctgaagccagctggtcactgtatacataggatcaaggcagcttggagcctcataaagcataactttggatttttaccttgtggatttagatttagttaatcaccttgaatcctcccccaacacactgggcaatgaggatgtaacaggcaaatagaaagcttgaacaaaaggagatgctcattatctagtagtttgcattccagatgggacataatgctagaccatatgaagaaaaatggactgactttccagaaaggaaagagagaatttagagggctccagtctctttaataaacttttgatgtattattttaaaattttctcaaaaacgttccctgctatagaattttaagagcaaacagcgattccgtctaatttaaaaattgtaagaattgagcagtgtttcatgaaattatattagttctttctttttatttgccttatgtgatagaggtgcctcacttcaatcattaaggcaagatttgtttagggcatggtagtaataatcccatacaattgtataaccctttacaatttacaaaagggttttcatacctattatctcattagctgttcacagcaatcctgtgagacagtcaggataggtactattatctccagttaacaaataaagggaacttaggctcaaagaagttaagtgacttggccagagtcacatagttagaaagttgtagaactggaagctgaacccaggtttcctgatacccagccccagtgctccttcggttgtatcatgtttcctcccaaagacactatctcctttttgttcctactcgtgattaattttaaaatccgtctaaaaatgagctttagtttagtggatgagtaaaactgaagcacttacatgtaaagtgctttctcaagtcacctaatgaagtgggtcctgcacatagctcttggcttttcaccttcattttaactgaactatttttaggtagacatagatttgtttttcagtgttaaatatatggacaaaagttgtgtgatccactgattataggtgtgaaagctgcgcttggggaatgggactagggatgaagaattgccttaaaataattagcttcttgcctttgtgttaagagatgtcatgttcaatagaatttaatttctttatacttcctttgcttccagccttttaaaaatacaattctttagggaaaattagcaaatattcattctgaatgttgatttctcaggaataagggtagccagaggaaagaaaaagcaaaggggtgactttctgtgccctgtaagagtgggcaaacattattttgtttggagctgtgagctaagatttcttccaaggcatgcaaatcgtaaagttctgatttgtcaactgcatgctgtttctttaggcactgatgtatgaaatcccgaacgaattctccaatgaacatactgctaattgcttctccacctgctctccaacctcctccaccccaccccctccactcccaattcagcctataagtgtccgtcattggagatggatggtgacacatgcagtaatagcaattcataaaagccagttccagcccttgtcttcaaggctcctggattttccactgcctgcttttgtgtaagtgaagtggatggaagtgctactggcatcagaatcctcctccctatgctccgttgctgaagctcagttgctcggctggagctgagctaaacagaagcgtcagatctaagctgaattatagctatttttctttttcctcaatggggtgggtgggttagggatagggtatagtgggggtttggggtgctttggcttttcttcttgtggagagaagagggtaaggagagaataactcacgataggatacaacgtgaaacagttccctgaagagtgtcacaatgttcctggtacaatatacaggtatagtatgttttgttttatctgaatttcccctttgtttcaaagtgcatttctttcttttatttttccttcagttcaactgtactgaaggacaaatagggttctaatgagctaaacaaaatagctgcataaaacatgcctgcccccagctataatgtttgtagcagattgctgtataaaatctgcgttttctgttaaactggtagtcccgatcccttaattgtgcacgcttctctgctgtattcttgtattgaatttctcaagtcttatgtctgcaactggtagtatgtgatatagcttagagtgtttgcacagaagacagtgc

SEQ ID NO: 139021 - DNA, 1073 bp, Homo sapiens
ttttaaattttactttaagttctaggatactgtgcagaacgtgcaggtttgttacataggtatacatgtgccatggtcaaggatctagaaccagaaataccatttgacccaagcaatcccattactgggtgtatatccaaaggattataaagtccactttctaatttggcagtctttgagaggttttaccctaatcacttgctactattcagcaatgccatctctgctagggtttctttccatatacagagatcactttgaacaattgtttccttctgcacacaggacataacttcctgcactccttcacatgttactcagatgaatattcattctttccaactcaaatcagtgattccagcagtaattgaggtttgattatcatgaaggaaagaaatcagttttgaagcacagcagcttcatttcaaaagcattctatgaggcgtatttattgcttgctgagtcagcagggctgaggcacgtgctggtcagctgcccttgggatttgggggaggaaaaaggaaaggctgaagagatgtcaggaagtggctatttgaaaaataagcagcaaccagcatgttggaaatccttaaacgtcacatccagatatgggaagtggatagacgtaccagatgtacatgaatataaaacaaatgcatgttgaaggtacctgtgcccaaacaaattgtaccatctagccagtcagttttagatcatgttctttccctgactcagatactgtaaatggcttcccattatccataggatgaagtccaaactcttcagcctgacctttagtactgtctgcaatctggctccaacctacctttctaatctttgtacttctgtcttacagaactctgctccagccagttaccctttcagacactgctttggcattccattacttacagtgggagccctctcaggggctgtattttttacttctttgaattccccaaagtgcctagcacagtgtcttgcatatagtaggcccccaatatatatctgtgactgttatttttccccacccttccaccattgtttccaatatctctactattaacccaatg

SEQ ID NO: 139022 - DNA, 1030 bp, Homo sapiens
caaaacatgctatgtttctatgttcattaagattacaatggaagctatagttaccactcgagtggatttggattacacacaaacatccttcccaccttactcagtgtccttgagagcagtagcacaaatattcaaggcactgattaggaatatgaccatgatctgtgacccttaggcatgcaagaaattcctcagcctttaagactcagctcatatgtcaacacctctgtgaagccttcccgacagcccttgcccaacatacatgaatgcacgcacaaggcaatgttaggcctcgggcttccacaggaccctgcacttagttacctccgtcctagcctgtaccacactgtagggtgtcggtctgtggatgtctctgtgttccccactagactgtgaactccttgagggcagggaccaggtttcattcatctccatacccatagcatccagaagagcacttgacacatggtagtcacctaataaatggttattgggtgaaaagaattgataaacagatttgcatgaatataactggggaccttggtagcacagagtgccaaatgctatgaaaagactagctgtttgctacatttgctacttttgctgaagaaaggagtaaattaaagtgcccataatttcatgaaagacctactttttccctcttttcttcactctcccctggttatcttacctttttctttcctatcatttacctatccaggcacctattccttagccctgcccattactttgctgctcttgacagagttcatcttcctcctgccctgatactttgccaggaaacatccttccttctacccacccaagtccagtacactccgtccttgacatcactctcaagttcatctcctactcatagactctgctgctgggactataatttgatacagctcttctggagagcaattcgtcaatatgtatcagaaaccttaatagaatacagcttttaacctaccacttcaacttctagagctctatgctgaggaaacaatcatgatgtttccaaaaa

SEQ ID NO: 139023 - DNA, 1850 bp, Homo sapiens
gttcatctatggaagttcaagcctaacccgggaagtgctgaagccctcatccggctttcaggctttgtgaaggaggtgaattttaatctgggctccagcagagtacaggggatttgaagttgtcaaagaggagggagaaaatgcttcctgctactgagattggactttgagaagggtaaacagaagagggagcactgtgagacaggtgggcttgcctgattggaataaaagatatcagcacaaatatactgggaaataaatagggtggagaagcttggggtcataataacatgatactttgaaacatacacatagtttggatattattctgtatcaaataaaattgaaggcaaaaattaagattggatgatttttcttttcatcctagggaacctgatttgagatcaattcttggagaacacaaagaagtgtgatggtatgttccaggtgtgagtttaaatccaagaagaagcttgtcttgcagatgttttgtttgtagctattcttagctacagtctatagctgtcaactttaaagcctagagacatcgatatattttcttaagaaatgcatttgctgtccccgtgcatcacattatctgaactgtagtcatctcattgggtgacaataatgactgctatttattgaacccacataatgtcctagtcatcatcataaatactttgttgcattatcttgagtgttatgaagtaggtactattattcctgtttctttttctagaagaaaacactaaaatgcacagaagttaaacaatctacttaaagtcacatagattataagttgagttgaggtttgggtgtacagatttctgactccaaagcccatgctctgttcaacatggtttgctgctcccaatgttctttcttgttcttgactttccagttgtggtaaggagagataggtatagttcatcatcctggccaaaacccaaatgattcacttaaaatttctatgtcagaatgtatttgctgtaaagtagctgccaaaaccaaattaactgtcattgcaactgtagctaattgtgtctgccaaaaccatagtcagtacggctatttctgaattagatgattctctttataacacatatcatacctctaagctatttggaccttgatagcactttggatgtattttattttagcattttaagaagttacctgggacactagatctctttcatgacctctgcccacgtgaagtgttggagaaacaatgaagtacaaggtgtgaactcttcctggggtctagctggggagctggatgcccacagttctgagatactgtagtgtgtagtataacagagacaggtacaaaatgctatggagggataaaggaaggtgtgactcactgtaagggagactcggggagaaggcttccatgaggaggtgacatgagataggtcttgaaggatagtgagtttgccccaggcagggaaggagtggaggggaggcatttcagatagaggagtcagtctgtgaaagatgtgtggctgtataagagtagggcatgttcattcaatgtggaagaattcagcatggttggagtgcagatagttgagtaaaaggaaactgtaatgggtaggagaagagtctggaaagaggttggggctgatttgcaaagaaccttgattgcaatcctaagttggaatgtgcccccataggtcagtggttctcaaaacgtagggcatctgccagtggtagttacactgtgctcccacaaacattttaattttactagttacatgttcaaatatgtcttaaaaaacataaaactgaactaagccatcacatctaagattactttggattttacttcataaaaatagaaa

SEQ ID NO: 139024 - DNA, 1023 bp, Homo sapiens
actgctctgcactttttatatatgtgtcctgtcttctcattagattgtaaacccttaaaggacagaggcagaaagttgtttctagctgtatcctcaagcacccagcataattcctgtgcacacagtcagtgttcgatgaccatcttcacaggataaaatccaagattctcagcatgaaattgaaggccttctattactctgttcttgtccctttctgcagtctcatctcccatcaggctgcaactcacaatttgccacattgtaccctgtgcatccttattcatgccctttgcctggaaaattctgcccatatttatatttcacctggctaatgcccctcatcttttaatactcagatccatcatcatcctctccagcaggacttgcttgaccgttttctcctatccaatacactgaagcaaatgatgcttttctgtgtctctacgggattcattgtagatatagtttaataaattattattttatctggttgtttgccagtgtctacagtgcctaggagaatgcttgggatgtgggagccactcaatgaatattttttgagtgaatggctcaattgtttatgtgccttcctccctcactaaactattgttatttccttgtcatcaagtaccacctatagcctgacaatccctcaataatttaacactgtgataaatgttatgaaggaaatgtataggaaggtatataacaaggttatctaatttggattgggttaggaatatcagataaggtttatctgaagttatgacatttgaacagagaactgaaagataaacagaaataagccaggcaaagataggttataaggtgaaggggggtagcagaggatttcagtggcaggactagctagcaacaaggtctgctgtggaaaagttcttagagtgattgggaacagagaaaaggctagcatggttagaatgcagtgatcaagggagagagtatcatagatgggactgggaaggtaggcaggaatcagataatgcattgcttcactagatttct

SEQ ID NO: 139025 - DNA, 1086 bp, Homo sapiens
ctcttaagcttggagacttcacacttatcctttcaggtagaaaatctgatactatgggaaagtactggatatagaatgttgagcagaactgcacagattgcatataatgaaagcagaactccatagacaaagtcaggtgtcaattaaatttctgaaataacaatattcctgatgagggtgagtggttttaggtctcagtttgattcacatggaaaacaaaagcggaagttgagtagtaaggcaaggttgcccccaaactggacaaaacataaggcagccatgtttgccggagttttttcagacacgaggggcgggagaagagggatctagacacggcttcttggcgtttctggagcactactgccatcgtgaggatgaagtttcatgaaaccctacgccattacactgttctcgaattctggagaacagtatttttctctctgttggggaaattctgatctgtgggaaggaggaagaggcgtggggctccaagctaggtcttcttgccttctcctctaagaccttaagatagacctggacattggcggtatcttggtgtagaacctggagagtgaggacttagaatgaaccagcccctgccgggcggtcctggcacagaaagtcgtggggcggggcctcggttcctcctctgggcaggactgcaggaacccgctcaaagacaaatgcaggctcttgtgggcatctgtctcctgttcctgccccttggagcaaaagtcagtaggttttcacatggtattatcttactacgggtctttggctctcttgtggcatcagtatccgcgcacaataaacaacgttcttccaggggaggtttacaggatttgctcttagaaccttcactctccaggttctataccaaggtaccgccaatgtccaggtctcttttaaagcctcaaacgagactaagcaaggactcccagcatggaggcgaaccctcttccaccttttaccagaccacacctgccccaacaggtagtcctcactagaactctttaatggcgtagggtttcgttaaacgatatcctcacgatggcagtagagctccagatatgccaataaacctca

SEQ ID NO: 139026 - DNA, 1026 bp, Homo sapiens
taaaagagacgtggacattggcggtaccttgctgtagaacctggagagtgaaggttctaacagcaaatcctgtaaacttcccttggaataactgtgttccttgtgagcgatattgatgctaccagaaaccccaagacccatagcaagatgctagcaagtgaaagcctgctgactcttgctccaaagggcaggtagaagagacagatgcccacaagagcctctatgtgtgtttgactggttccctactgtcctccccacaccggaggaaccaagtttccgctccacgacttcctgtgccagtacctcctggcagctgctggttcactccaaaccccgcactctccagattctacaccaagataccgccaatgtccctgtctcttttcaggccttagaggaaaaggcaggaagacatagcctgggggcctacagatcagcctttcccccacagggaggctttccgagaaggacgccatgatggcgtattccgtctttaaacgatttcctcacggtggcagtagggttccacattttcaatcaagccctgtcttggagcccttttctcccgccctttctgtttgaaaaaacgccttccagagataaaggcgccactgaacatggattactggagatttgtccagttgggtgcaacttgggtttgtgacccgtagagggtcaggattgcaagttgtccaggttcttggcgttttgaacaaataattgcataaaatgcccagcaaagcaaagcaagaatgaagtaacaaaagaatgaaagcaagggtttactgaaaacgaaagtacactccacactgtgggagatggcctcagcagaggctcaagggcctggatacagaatcttctttggttcaaataccccctagaagtttcccattggccacctcatgtaagtggagtggtcgcccgaaataaatctgattggttgcagaaaggagacaaccagaggctaaactgaagttacaaaggtcacactcctgtgcaaatatctgattggttgcaaaaagcaac

SEQ ID NO: 139027 - DNA, 1081 bp, Homo sapiens
tgttaaatgatgagaccatgagttgaaactctgagtcaccttgacaggaattgagcatatgtactatgagtatcatgccatgtggagtatacatggcatgcaataaagagcgtcacctggtttctcctctaatggctcatgccaaattgttgcctacgatgtaccacataaggctcttagaataggaagaattccctggatgcctgacaggggagccagggccaagatctctgggatttttaaattgttgctggagttcctttccaagctttcagcccttttctcctttttgtgcgttcatacactgaagctatcccctgaaaaagacagtttgatgccacggaaattattggacctgtaactctgaagtaaatgaaacccacacagactaggtcagtagaataatttcttaaagaacaaaattcctgatgagggtggttggtttaggccttggtttgatttcaagtggaaaacaaaaagaaaaagcacagcagtaagaccagctggctccaaactgggcaaaatagaagacatccatgtttggtggctctttgtctatgtgtggcgttttttcagacaggaagggcgggagaagagggctacgtaacaggacttcttggcatatctggagcactactgccatcacgaggaagacgtttaacgaattatagtcgtttaacgccattacagagttctctgagcactacctgttggggtaggtgtggtctggtaagaggtgaaagaggcttggcctccatgctgggcgtccttgcctacttgtctaaggccttaaaagagacctggacattggcaatatcttgctatagaacctggagtgtgaagcttctaataacaaatcctgtaaacttccctttgaataaacctgttgtttggtcacagagacccaaagacccatagcaagatgccaacatcagaaagcttgctgactcttgctccaagggacaggaagaagagacagatgcctacaaaagcctcaatgtgtgtttgagtgggttcctgcagtcctgcccacaccaggaggaactgaggccccgacccacgacttcctgtgccaggaccg

SEQ ID NO: 139028 - DNA, 1026 bp, Homo sapiens
accaaggcgggcggatcacgaggtcaagagatcgagaccttcctggctaacacggtgaaacgccgtctctactaaaaagtacaaaaaattagcagggcgtggtggcgggcgcctgtagacccagctaggcgggaggctgaggcaggagaatggcgtgaacccgggaggcggagcttgcagtgagcagagatacaccactgcactccagcctgggcgacagagcggagactccgtctcaaaaaaaaaaaaaaaaatacacttggtgtgatccaaatcacagtgtacacagtaatccacttttaacacagatcaagattcctgatgagggcgggtggtttaggccttggtttcatttgaactggaaaccaaaagaaaaagctcagcagtaagactagctggctgcaaactgggctaaatgtaaggcacccattctgcagggcctttgtctataggtggcgttttttcagacaggaggggcgggaaaagagggctctggaacagtgcttcgtcccatacctgaagcactactgccatcgcgaggatgttgtttaacaaatccctacgccattacggtgttctcctgaggactacttgttggggaagttctctgtggggaggtggaaaaggcttgctccatgctgggagtcctagccttctcgtctaaggccttaaaggacaccaggactttggcggtgtcttggtatagaacctggagtgtgaaggttctaataccaaatcctgtaaacttccctggaataaacctgttgtttgtgcgcggtactggtgctaccagagacccaaagacccgtagcaagatgctagttcgagaaagcctgctgactcttgctccaagggacaggaagaagagacagatgcccacaagagcctccatgtgtgtttgaatgggtgccttcagtcctgcccacacttggaggaaccgaggccccgccctacgtcttcctgtgccaggatcgcctggcagctgctggttcactacaagcccctcactctcctggttctacacca

SEQ ID NO: 139029 - DNA, 1002 bp, Homo sapiens
actcttatgttagagccccactaaatagcgacctccctctcaacatacaaggcctactgactaggtctgaacatggagtaaacctcccagggaacctgggtagggagtcaggagaagaaacacgtggcctggtgcccagatttgctgtcctccaagacctcagatgtcaacatgttttttttcctttctctttagacatggatccctgaggtcggtccccaatacgacaagacaatttgatatcataatagaacactgcagaaacaatgctgagtgaagaagagtagaaatgggaagacttggttgagcggaaactgagttcttgaaaagaggagatgcttgatgagggtgagtggattacacctcagtttaatatccagcagaagccaaaagtggaataccattacgcaaatgtagcaaaatgttaggtagccatagtttctggtgtctttgtctcttcttggccttttttttgaaacgtgatgggcgggagaagagctcctggagcaaagttagttggcttttctcgtacaatactgccatcgtgcggaaatagtttcatagcgtccaaagccgtgagcgtttcctgcatgtaagccctagcagttgcggaaggaaaagccacccaagacacaagttggcattcctacccttttctctgaggcctagcataagcaatagacaaatgcaaagtcttagtgaagtatctgctgagtgagggaccaggactaagccaactgtttccaggaactcctggtacaggaaatagaggacagggcctcagtttcctcatagtggggacaagactagaagatgacagagccaagtgcagacccctggggcatttatgttatgaatatgcccttgggagttttaggcaatctggctgtccctgtgttatgcagctgtgacatttatagcagcatcgttagattgcaatggacaggacagttccagggacaatctatctgaagccagtgtcattcacatggtcctcgatac

SEQ ID NO: 139030 - DNA, 1023 bp, Homo sapiens
gtgaatgtactaaatgccaccaaatttgaacattttaatggttatttttatgttacatgaattttaccaacacagtttcaaaaagtgccaatatttttaaacctatcattatttccaagaataattaattacatttgaaaagtactcaagttatcagtgaagaaaacttgtttcaatgattatactacaggggaatttgaacattagtttataaatgtacatattatatgtgcataggaaagagatcataatacatagcatagatattttaaaagtgattacttctcactaggtttgacctaccatatgttttctgcttgtaatttcttaaagtttttctagagtaaaatataaaaaaactcaagcactcaaaagtatatattgatatggatatattcaaagattataaggtgatgccgaagattttgtacaaaattgcaaacagtatgaatccaattatattgaatgtaaaatgtgtgtgggactgtgtgtattcatatctgtttatatgcatatacagatttaaaaatgccatatatatatttttttagacagggtctcgccctgtcatccaggctggagtgcagtggcatgatcgtggctcacagcagccacgacctccctgggctccggtgatcctctcacctccacctcctgtgtagctgggcccacaggtgcatgccaccacgcacaggtatattttgtattttttgtagagacagggtctcactaaattgcccgagatggtctcaaactcccgggctcaagcaatcctcctgccttagcctctcaaaatgttgggattacagtcgcgagccaccacacccagccaatggcatatatttcaaatcatggtcagtgttatagtgagtatatgtttgaatatgatatttttggccaacaaattcatatctttaattcatagttatataaacagacattaatgaaacattgtagctgcatgtgagtggtgtgaatacatccatcttacagttttcttagggttcacatctaagtgactga

SEQ ID NO: 139031 - DNA, 1788 bp, Homo sapiens
ctgtcttggccttctcttcctacttctaccaaacactttctgacaattcatcacataaactgagaaaatggaggaggactccctggttgtctggggaggggaataggtcaaagatcacctagacttgtgaattggtggctcatgatgatctccaggcttctgaccatttattatcgcttttcttctctgatcggtctaatttccggcctgagacagacattttgataccatgtgaaagtactgagccaacccacatagactaagtctggaaaacatttaatttcttgaaagaacaagattcctgatgaggatgggtcgtttaggctttgacttgatttcacatggaaaagaaaagcaaaagtacaggaatttgcacaggttgccccaaactgtgcaaaatgcaaggcagccatgtctcctggcgcatttgtctctgggtggcgttttttcagacaggaagggcgggagaagactgctccaagacagggcgtccttgaaaatctgaagcactactgccaccgtgaggaaatcgtttaaagacagaataggctattacagcgtccttcccgggaagcctcgctgtgggggaaagtctggtctgtgaggaggtggaagaggattgggctccagactaggtcttgttgccttctcctctaaggcctgaagagagaactggaatttggcggtatcttggtgtagaacctggagattgaggggcttggagtgaagcagcagctgccaggaggtcctggtacaggaagtcgtgggtcggggcctcagttcctcctggtgtgggcaggacagcagaaaccctctcaaagacacatgtaggctcttatgggcatctctttgctgttcctgccccttggagcaagagtcagaagttttccacgagctgtcatcttgctatggatctttgggtctctggtagcatgagtgttgcgcacaattaacagggttattccaagggaagtttacaggatttgctattagaaccttcacactccaggttctatagcaagataccgccaatgtccaggtcttttttaaagccttagaggagtaggcgaggcctcccagcatagaggccaagcctcttccacctcttaccagaccagacctgtcccaacaggtagcccacactagaactctgtaatggcgtagggtttcgttaaacgacatcctcacgatggcagtagtgctccaaatatgctaagtagtctggtcttggcgccctctactcccgcccttcctgtatgaaaaaacgccacgcatccacaaaggcgccaccaaacatggctgccttgcatttagcccagtttggggccagctggtcttaccgctgcacttttgcttttgttttccacttgaaatcaaacaaggcccgccttcattaagaatcttgtgctttcagaaattaaatatcctcctgtccaagactttgagggtgcgatttatttcacagagttaaggggccagtacacttcatggtataaaattatctttttcaggggatgaaggcacaaggagaaaattacttgaaacttggagatcttctctggcaagcaatttacaaattctggtgttctttgatctggctccccgcccagacaaccagggagttcttcatgttctagcctcatgtgttgcactataggcagtaatttggcatcagccatagaggagggatccgatagttgtcattgctgcccgccacatatactccacatggaatgatactcataatgcatatgttcaattcctgtcgaggttacacagagttatatc

SEQ ID NO: 139032 - DNA, 1017 bp, Homo sapiens
tattatttaacacaaaatccaattagctgaagtatgtttagtgacattttaagtaggctttctatataaaacctgagaaaaatgatagaaggaaaaatattaaattagaaggaaatttcacataaagggtgttatttgatgtttataacaaaaaaaaattcctgcacatgtacattccctctaccccccccaataaaatgcaaatagaagaacgagctaaatgcagttgagaaaaacagtaattgaattttgattgagtttatgtgatagagaatatgtctcattaacttctgctataattgttcaatttttcatttttttgctaagtgtttatatcatccttaggatttgagcactagttgattcattgttatttttgaacaataaagaaatgttatgagagttagcaataaagtactattagttactccatgccattggaaatttcccattacctaatattgtgtgaaatattcaaggcattaaatactacctatagtttgatgaggatggaattgaagggagtaattaatgtgattgtgtgtgtatgttgaacactttgttgtgcaaataagggagtatattaataagcctctatcgctttagttaaatagtatcacctctcatgaacaatcatagaatccatttataatatttgaatgcatgtagccatcaagctgctgatggtggttgcttcatgaaaatgggatttacgatgaagtgtttttgcttgtccttcacagatttgaatattctaagagatttctcaaaaagctgatattcataatttgagaagcaatcaagaacaaacgtgtactgaaacagttggtgcaaaatccttattgaccacagatggaattcagtaatttatatttcttcgaaacatagaaaaacggaatactgagatctggtggggggccggcggcagtctgggagcggcgcgccatgtacaccatcatcaacgggcccagcaagttggtcgcgcagcgccgcacaggtctcacgcagcagcaggtg

SEQ ID NO: 139033 - DNA, 1060 bp, Homo sapiens
agccccacctccaggacttcctatgcatgaatttcctgcctactccccggtcagttctggccacttctacaactatatcacacctttgtccacagattctagaaggtctgagagatgaaggcaaggacatcacgcttgaggccagaagccgtcccaacttccccacaggtgcaaccttccttgacatcctggttttttgggaggaattgttcatggcttggattttcatcaactgatttcctcacgatggcagtagtgctccagaaatgtcaaccagccctgtccccagggcctcttctcccgcccatcgagtatgaaaaaacgccaacaaaagacaaaagcacatggaaacaaaactgtttcaattcttgcccagtttgaggaaacttgttcacaccactgtgcttttgctttctatttccatcttaaatcaaaatgagtccttaaccaccccgccctggtcaggctcttccgttttccagcattaaatttccaccagatctttggcttcacagttcagctcttcttctctcaacattagttcttcagcattttctcaatttattaagttgacttcttaaagttgaacaagactcaggattccaggatgaaatgggagaagaaaacgccgtaagttccaggcctggaaaaggtcatctctagtcacctggcatcatggtccttgacgcagctttctaggttaccagggaatcttcctccattttgtagcagacactaatctttttgtttggtggaaggctgttatttggccgaattcctgagattattttcttatagcctatatagctctcattggtttgacatgtcatatgtgacataccaaatgtacctttatatttatttatttattttcgagacggagtctttcactctgtctcccaggctgcagtgcagtggtgcaatctcggctcactgcaaactccacttcctgggtccaagcgattctcatgcttcagcctcccaagtagctgtgactacaggaacccgccaccacgcctgactaatttttgtgtttttagtagagatggggttttaccat

SEQ ID NO: 139034 - DNA, 2738 bp, Homo sapiens
atcacagaaaacaggtgtattcaagacacccacattttaaaaatccttatctgcttcagtgggcattacttgtggcctcactgcacttctttgtacaaggctaatgtgtctggttattttgtaaacaggtatgcttaattttaggaaatgcaaaaatatgagaagcaaccttaaaaatattgcatattccaaggagtagttaatgatgtttccaaagacctcaaactgtcctgagaaaagcatgtctgacatacaaggtaactgggattttaggttaaaaaatgtacattatatatggatagggaagataagagaatgtatggcaaagacattttaaaagttatttcttctagttttcattgagataccatttatttttggctttgtaatttcttaaaatatgagcagatttccaacagcagatgttacctttataattccttcgaagagaaacctccttgtacaatcaagtataaagaaatttccagctagggaaaatagatgttgatatatggaaacatgcaatttatgtaagttggtgcagaagactttgtataaaactatgcccagtataagtcaagttataattaaggtgaaataaatgtgcacatatatgtatagcaatattatatattatatatgccatatttaaactataataaatggagcaataagaaacatttttgtttgtttgtttgtttgttttttgagacgaagtctcgttctgtagcccaggctggagtgcagtggcgtgatctcagctcacggcaacttccggcctcctgggttcaagtggttcttctgcctcagcctccagagtagctgggattacaggcgcgcgccactgcaccgggctaattttttgtatttttagtagagacgggatttcaccatgttggccaggctggtcttgaactcccgacctcaggtaatcagcccgcctcggcctcccaaagtgctaggattacaggcgtgagccactgcgcccagccaagaaacatttttttgcagtgttttgattactaaacatgaagacaaaaattttatgtaatgtggccaaactgtctgagaatcaggagtggcaatctcctaggcaaaccatcatgtacaaacaaccaattttaatataaattcattgtcacatatgaacataaatataaaactctgtgtgtattgaaaggagtaagaggacatgatccaaaaagttatcagtggtcttaatcaattttatgacagcgctttactctttatcagtgcatggttatttctgaatccttggcaaacatcatgtcttaattactaatgaggaagtggttttaaggcttatctctaagagataaatggtaaatacagatataaagataaatacacacacacacacacacacacacacacacatgtccctacatatccaataaagtggtaggaagcaattggagaccacttaatggcatcggaaagtgtcttcaaatggtaaatgaaatcacaagacaaaactcttggaatgggagctacttgggcgcttctcttaagactccagccaaatggctgccaacaagtcaacacataagacttagatctctatcctgaaaatatagaattccttgggagccttacagatggatgagccaggcaaggacatgtggtttggtacttagagataacctcccggccttgagtttgtagcattttctttttctgcttaggcctggattcttgagtcttgaatccagaagcagacaacgtgataacttgggaaaatactggagatgtatgctgagtgagcgagaacacaactgtgaaagctaaacctattggaaatgcagttcttaaaaagagaaggcctcagtttcgtttcaaatggaaaccaaaagcaacagtgcagcagcgtgataagattgtcccaaactgggcaaaagtaaggctgccatgtttcctggcgcctttttcttgctggtgtttttttggacagaaagggcgggagaaggactagggagcggtacttgttggcatatctggagcacgactgccatcgtgaggaaatagttttaaaataccctacgccattacagcgtccgtcccgtgaggtctttcggtttagaaacgcccgttcagcggagagattgaacaggccctgacccgaaattgggcttccctgacttctctgaattattccgggagctctgggcaaagacttgatgctaatatgacaaaggtgatatccaagtgtaaaaacctgttgttggcgaggccggacagagccaacagctgccagaagtccgggcacaggaagttgtcgggtggggcttccgttgaggaaaactttcagggcccagtgcagggcttgtgcccattgtctcctgttcctgcccctgtccctcagaagatggttcaggccaattcaccttgttctggagccatagaacctgagctccttgtgatagcagcatcacagctcataaaataggctaatttgaggagataacttataacagcatttgtgcttgctgggggatctcatacacagcaaaagtctggaccccattgccttagagcaaggagggaaatgaagaagcattgggagccatcccgccgagccaaaaaaggccaaatctcctgcttagagagcagaggcatacactaagaggccaaaaaatgttacacctatagccaaggcctgtcccctaatagagttttgccgtcatctcaggtctcttggtggggttggtggggaagaa

SEQ ID NO: 139035 - DNA, 1016 bp, Homo sapiens
taaggcaatggggtccagacttttgctgtgtatgagatcccccagcaagcacaaatgctgttataagttatctcctcaaattagcctattttatgagctgtgatgctgctatcacaaggagctcaggttctatggctccagaacaaggtgaattggcctgaaccatcttctgagggacaggggcaggaacaggagacaatgggcacaagccctgcactgggccctgaaagttttcctcaacggaagccccacccgacaacttcctgtgcccggacttctggcagctgttggctctgtccggcctcgccaacaacaggtttttacacttggatatcacctttgtcatattagcatcaagtctttgcccagagctcccggaataattcagagaagtcagggaagcccaatttcgggtcagggcctgttcaatctctccgctgaacgggcgtttctaaaccgaaagacctcacgggacggacgctgtaatggcgtagggtattttaaaactatttcctcacgatggcagtcgtgctccagatatgccaacaagtaccgctccctagtccttctcccgccctttctgtccaaaaaaacaccagcaagaaaaaggcgccaggaaacatggcagccttacttttgcccagtttgggacaatcttatcacgctgctgcactgttgcttttggtttccatttgaaacgaaactgaggccttctctttttaagaactgcatttccaataggtttagctttcacagttgtgttctcgctcactcagcatacatctccagtattttcccaagttatcacgttgtctgcttctggattcaagactcaagaatccaggcctaagcagaaaaagaaaatgctacaaactcaaggccgggaggttatctctaagtaccaaaccacatgtccttgcctggctcatccatctgtaaggctcccaaggaattctatattttcaggatagagatctaagtcttatgtgttgacttgttggcagccatttggctgg

SEQ ID NO: 139036 - DNA, 1108 bp, Homo sapiens
cacaaccagaagacctggaagtattttctgaagccaggaggtaacagctaccatggctttgcagcactttttctagggcccagtgtgaaggcctacctatttagagaaacctactcttagctctattaaaggaacagaaatgagttctttagctattggccttcccctaaggaagatgaggccattgagacttgggacctaactgttcattcagattagcaagtattgttctctgtgcctgcttcttagcctttttctaatgaagattccttgtaagccctctaaaagctgagcacatcaggaccctcaggacacttgcccatagcatagcaagaaaaggcaaaaattttgtaagattgactgcatgtgagagttttctcgtgtatcagtgatggattcagtggctgaccacttacagaagagaaaggaatgttattctcatgcactgctgtaacatatggtcaccacctgaattctacttgcccagggtggagctataacatctactaggaagtttttagcaactactacaaagaccatagggtccctggggaaattgactttcctgctattcatgccttggtctagctgtccttgaggatgttataggttgacatgagccaagaagggtttgaaaacatttgagaaagcatgtctcaatggtctcaaataccttatgaaagtgtaaggtgacctctgaccttttcagcctacttcagctaagcaggtgactgagagaaaccctgcatcagatgggttaggctgcctgctgttgagtcacagtttgacttgaccatatgctagactaggaaagccagatgtgtggagacagtgcaccataacttaacttagaattgtgagtgacagagaggtagccccagccctagaattcctcagggtcaggaattttgtattcccacacattttggtttacattaagagactatctggtcagagagtggatagaggcctaaagcagcagcaacttgctgagtcccaggaattcaaacgtgacaccgtgaccaggaatgggagattataactattgccaactctcaataccactcaatcattgacagtcagctcagatcaaaagctgtttcaaaat

SEQ ID NO: 139037 - DNA, 1137 bp, Homo sapiens
tatattggaaagttccattctgttagaggctgagcaggctcggaccatgagctggatcttagttccacctcctgaggcctacctgaagctctggacagagtgaggtccaggtgtaggaactggcccgtggggagggaagactaagtcggcctctggcaggaagtccaggcccaggaagttgtagggtggggtcttggtattctcccagtatgggcgggactggaggaagccaccaaccaacgaagtactgggcctgtgggtattcgtctctctccccgcccctgagagtctgggaaaggctgacacgtggtgccttcaggctctggggcctaggacctttgtggtagcagagtcactgcagagaaccagacaataccaggttgcttataaaaggatgccatgtgcttgctggaggtcccaggtgcaaccaaattgcttgcagctaggaggaccttgaagagaaatgggatcagcccgccaaaccaagaagggttagcacttttgctaggagagctgaccacgcacaaacagatgagaaccaaaaccgagtgaagaggattgaagatgaacccacattttaaaagttcttgtctgctggaggtggcattacctgtgacctcgcttcacttctccatacatggctgttatagcaggtacattgtaaagaagcatgattatttctagaaatgcaaaaacatgtggcaagattttaaaacctgtcattattctaaagaatacttaatgagatttgaagagcattcaagttacaaatgaggaaaacttgttttagcattcaaagtacaagagaatttgaacattttttaagtgtatattatttgtgcaaagtgaagatataagaatgtatggcaaggatatttttaagtggctatttcttgttgtgattgaagtaccgtttactttctacttataatttcttaaaatctaaacggtgccaacagtgggtgtaacttttgtaatttcttgaaatagaaaggtcttctagagtaagatacaaaaaaaatccaagcactcaaatatacattgtcattcatgtatgcaaatggtataaggtggtgttgaagaatttgtgcaaaactgtatccagtttgcattcaattgtctttaaagaaaaggata

SEQ ID NO: 139038 - DNA, 1471 bp, Homo sapiens
tgttttgagaaaggctctcactgtgttgcccaggctggagtgcagtggtgtgatcatggctcactgtagcctcgcccttctaggctcaggtggtcctcccacctcagtgtgctgagtagctgggactacaggcacgtgccaccatgcctggctaattttttgtatttcttttttagtagagatagggtttcaccctgttgcccaggcttgtcttggactcagctgagctcaaatgatccacctgtctcagcctcccaaagtgctgggattataggcatgagccaactgcacctggcctaaatctccttttttttaaaaaaatgatatcttgattaggaaacattcagcaaacattttaggcaatgttcataagggcaagtgaaaaatcttaacacaggcaatcataatagaacagtaatttaatttgaggctcataaaccaactagagaatgacttttatttatatgcattctgcttcttagatgacaggaaactgtatatacatggaagtaatccagaaaaacatttcgtctctagcctgggagaactgatttgatcaatttaaacaggtagctaaatatctctagtttagtacattgttaggctgaagtttttagttgctctctgtgattgtcagggcactttgtattcactgcaagtcactcctggtgttcccacttgaggacttcaaggaagtaagaaatcttcttttaagccttgatatcattagcacattatttgctcattatttcctgtaacactcctcctcatcaatgagtcactgataggcctatatacaggccagtctttgtaaagtgcaaaaagttattttatagctacagcattcatagtatgggctttattaatgtaggaaggcaggtgcaaaacaattcaaccttactcagcttggttcttagttctggaagattcttttaggatacgtgagttgaatccttccaggtcaaatcctgtgagaaatctgcctcctcttccttacatctattatgttttcactctcagtcccagagtcttactgggggtcttagttaggtagttcaaattcaaagaactagattctttaccttggttctttcccacattttgctctctaggtccccattctgcgagaactccaagactaattctaaatccgtcttcaatgttcttgtttctcctggccaccaattcctaatgcccccctccacaagttgacccattttctactaactagatctaaaattttatccttcatcaatgttggctgttatcctcaaaactctgtcatcagtcacatcttaacctattataggccctatcgacaatacatagactatattgggtataaacaatgtttaagaatatgtatacaaagtgtacgggatatgttgcttgtgttttgacaaacattatgtttctaatcttgagtcatccctcgggattccaggataccttcttctgctgtgtataccaa

SEQ ID NO: 139039 - DNA, 1577 bp, Homo sapiens
taaaatattaaatacgccctatttaaaatggctattccataatatattgaaaattggtactgatatggtttgacaattttattggttgcttatttattcatattcaatactcccatggaaaatgagtgacagctctatcttcttttcctaagatttcatatagagtgttttttaagttgcacagtagtatacatgtactagtcacccagtatttacttaatctttaaataattaaaaactagttttttgtttgtcccaaattttgattgtaaagtgtactcagaccagccagtgctacaaaaccatcgtccaagatagcttcttaagggattaaatcaaattatttttatctccttcacccatcattaactaaactctatgatataaaacactactttgaagaacatgttgcttcatgataaaattgtagaaatgtgcagctggcttatgttgattatttgtgttctgaatctatttaaagtaaataaatctgtgtgtatatacatatgtcttgagacatatgtatatacacacagagaaagaaatattctataatcttacaacgttttcataccatgtatttaaatcactttcttaaattgaccaactcatttattttccatttatattacaacatagtatgactgtgtgggtttgtatttttttctaaactaaaatcacgtcaaatataacaggattctgtttcatgtagtcaacataagtcaaggccacatcctctttgtgccatcagggaactgtgttatcagtcaacttacatacttattgtggcccattgttccatttcaggtgacatggaggattttgtgagtcaagttaattgagcaaactgggaaatgggttgttcttacacaggatgtcatccataactaagacctcactgtaagctggaggaaaagtttattacatttgagagaaaattatatgttctttgaaactgtatgcagttgtagtgatttccttgagacatgcaaaaaatgtactaggtattcattttgactaagctcactgtataacttcatttttgaaaacaagagttaaaaaccagacaaacacatcagtatgaccacagtgttttcctttaattttagttcactgggcagattttcttgacaaagttagtctttatgaagagtgctaaaataagcaaacccttcccttctgatctcataatattggaataatcttttataatctttaaatatttttctagttcagtgtaaatcttaaaatgacactcaggcattgaatagaatttgaatcatgcctttatttgctgctgaaaattgcctttagatttctgtgtatgttaaggaaatattgcctcccacccaccatcaccagtatttatgaaaaaaaaaagaattgaatgaagtaaaatatttcagaatcatctgtacggctttgtggccttctccttatttttcactgaaactgtatgtgcttacagccagtttatgtatgctcaatgcctctggaatattcttttattgttaacatttgttttggagttctcttataaaacttgaagaaaatggaggctagaaagtttgttcctt

SEQ ID NO: 139040 - DNA, 1049 bp, Homo sapiens
accttcttaaaacagaaaatttaagtaaagtcttttaaatgaaacctgtaaaagtattgactcttctaccaagttggtatgatattccaggcagctcaatgattatcacatttgagaccctgtgtttgaagcatttacaggcaatgtacagcaacagaggtacctcttggtgtatagtatttacattctcttttaggtagaagaggcaattttacccttatttcacatggttagaaatttaaagcaagatcatttacccaaggataggtgtttggtaatgttgaaggagttagtctggcttcatgttttacatcttcaactaaaatcccatactatctgcttggatttggagagccaaaaaataaagctgattgtcatgtgattaaatatctgatcaacaggtatgaatataacttaaatcagcatatttttgccatggtaataaattgtcctataaactatttatatatttttgttcttcataattatcactaataagcatcagtttgttgtttttaaaaggatatttaagtgagcattttctagttcatatgaaaataaccatagtacaggatgatttctgtccacacaaaggttaaattagattgcacagttaattttcacttatatttatggtactattatgtgggtgatgcctttttcttttaagcccagtacatatattatgcctgcctaagttctgaactggggctgtatttcagtagttgtagaattattgatatttagttttgatagctaatgtttaattgtttggatctgcacagtttggtttttgcacaaaagtcatttaaaaaaatctgagtaattgtcaaatattaaaagaaagatattcttcctgtaaggaatacagtttttagtcaaagtggccattacatcctctttttaatttacataatacagatacttgagaaagttgttgtggtgttgtatgccaagaaaattctttttattggtgcctatattgtaacaattatttttaatgcattgtattttgaagtaacggttcagttaaatttttcacctgctgt

SEQ ID NO: 139041 - DNA, 1046 bp, Homo sapiens
tgattctgaatcagagattcttaaaccagactactatgctttgtatggcaaagaaataaggtcacccatggccagaatccgcctgtcttctggtagtctacagttagatgaagaagatgaagatgcttatttcaacacaccaactgctgaagacaggacttcactaaaaccatgtaattactttttagcttaaaagtgtgaacctatggacatttctgagccagttccatgttaccgacttaggcagaaaataatgaagttgtagaaaccattttcttggttactacatattcattggtattaaggaaatctcattttggatgcctgccttatgaaagatccagctgttgcctcattccttgagtttcactcttccattacctctgaagggactttagaacatgccctctcctcaccagcactgtggcaaggcaaggtgggtatttgtcatctccactgcatacttcctcatagagacattgtgagtgaaggtcaggctcttcaatgctgaagaatggtgacagtatgggttggcatatggaattagcgtctaatggcatttagtgatttagtagattgtgactgtgttgatctttgtgctcttaaacaacactgaacaaatatttcagtctttactatttgtgtggggcccagtagaaatggtcttgtaatatgctaaatacttccatttttataacatataaaagcagagcatggccctcctacagcctcaggaaggaggtggtggcatagatcctctcaagagaatacaggtttagaattaatctaggacttggcagaattctaaacctaggaaattcatgaattaaatcaatttctagagccagacataaaccagatgaaagtatcatgttgttttacttataacttctatattcttatctactatatctagtaaaagagaaacattatcaggtcagtttgtttatctaatatttcctgccagaatttattttttgtcatagcttcttgcatgtatgcaggccaggaaatgaatgttattgtaataaagtgtgatggaaaat

SEQ ID NO: 139042 - DNA, 1132 bp, Homo sapiens
ttccagccccagggtctcattttctcctttagcaacaccaaactgcttgcagtttcattgttcaaaccaggttttctaatctcttctgcctctaacactcttcttctttccgctggctaactccaattcttgcttcacacctcagcttagatgtcccatctgttaggaatcctttctactacgccctcacccatctttatgggttaggtgatctcacattaccccctgcatacatccctccacaaaatcacttagctcaaactgctgtgattaaccatggatgtgcctgtcttctctgccagcctatgtgttccttggtggtaatgcctgtgtcttgttcatctcagtgtccctggagccgaggagagtatgtggcacagagcaggtgctcaataatctgtgttgaattgaagggacagtagaaaggatcacaaaagggtaatggcatacacaaaaaggaaaggaaagggcaggcacatgaaaattaagcccagagtttgggcagataaaaattacaaacaggaaaacaaaagagctcgaaaaatacaataaacaatagagtaaaaagcatactaaaggagagatgaggcgttgacttttaaagtgtttattaaggagaaggttaagactgatgaaacagttctctgtctctgtttttgtgtatggctgttatggctgagacttacctatgaaaatgtggaatcagagggttaaaatgaccaaaaggtaattcatttacttgccacctggagagatgatcagctgatactggtttatctgagagaaaaccaatagttatgtgtgtgattctaaatattgcagatcttgaatattcaaataaatattgcccttgtcaaaatagacccctcagatggtgcaaatgctaatagctaggtgtagcctgttctcacactgctatgaagaaatacccgaggctgggcaatttacatttgtttaaagagctttaatgattcacagttccgcatggctgggaaggcctcaggaaacttacaatcatggcggacgggcacctcttcacagggctacaggagagagaatgagtgcaagcaggggaaatgccaggcacttataaaaccatcagatcttgtgagactcgctcactatcatgaga

SEQ ID NO: 139043 - DNA, 2651 bp, Homo sapiens
aggaaaagtctaacatactgccaattaactcataattaacatgcatttgataacaataccatttccagttaaaatgtgaagagatcaagttcaaagtagaagcagcatttgcaacaacttttatactgtaagatcatttaaaccagtaaggacatttttaatattgcataagtataatacaagtacaaggcataataatattatagaaataagctagaatagctacacacacgcacacacacgcacacacaaagtacattatatccaatgcatcacttctgtgtttctatttttttttaatgacttatcaggacgagggaaaattaactttctactttaactgaagtttgttattcttgttaccacttctctgtgtatatagatctgttgtcagtgttctctttttaaactatgtatttctacatttttatgacatgtttatcttaattgcagataaaactcagaggaaatttgcacagatgctgctttggagaactttacaacctgggttgcagaactgagccttggtaaacctgtctctattacagcatgttgccatacatctatttaagtgcataaggtctttggccttcaagatccatcgaccttaaacaggaatgcttagcacgtttaccatacgtttaaaatccattctttatcaatcagtccttttatagctttctaagttcttattgatggctaatatacaagggttaatttttaatattttaattgatttctttaatcagtttctcgacttgtatttattaaatactcaaactcagtattacctactcaatgccttttaaaagaaagttataatggagaaaaaattgagccttaaacaaatggttacttctgtatattacctcgtaccagtgcttcatcctatttgtaaaatctttctcctttaaaattattggttaatactttgagactttgtttacgtgtggcagtgttgtaaaaagaaactaaagatcacattttacctgtatggatggaatatcccttttcttcaagtgcagtttgtgatgtgttttgtttttttttttttttttttgtaattaacatgttctgaaggttacaattgatatttgaaattgactgtagagcatttagttgaagagttaagcattcagttccattaggttttcacatgtgttaatctcatttacagcattgaattgcggcagtaacattttcctttctgtgaagttctaaatttagttatgacctatttagcaatgcctttgaaaagggatattgtatccatggtaaattaattgtatacctaaacagagatagctcatctttgcctatcaggcttgtaattgacatctagtagacttctgcacatgtaaaattgaattcaaataaaatcatacacactttctagttcttaatatttgtctttctgaataatagtttaaagcaatatttgttaaagttttcttgcactatcacaattgctttttagttatttctcaagaagcatgttcgtattagagacaaaatctgtgtaacaggagggagaatagcgccaagtctctgggctattttttatttttgcaaatgtgctttctaatagccattgccttccatgttgtttacctaatcagcatatttttgtctgaatacttgaacattttaacagtaacgcaggtgtagaatcagaaaggaaacttatgcagagtaatattttggttcagttttaacatcgtgacaatgagggctttttctagcaatgatttttaaattgtgtaagtttgacagtattttattgttgggtttttatttgattttagttgtgtgcttttcatttgcagaagttagtaactgcagctcacctactgcaccaaagttctcgattttaggagcccagctttagtcatttgaacatgcttctaaataaaataaaacaaaaccaaaactatacttttgatctataataagagctcaataactttgtcaaggaaagctctaatatatgcagtgatggtttatgaaagggtgtggcaattttaaatttatattgtgtgtgatgttcaaataaagtggtatctacattcatgtgatttatgggtcagcatgaccattaattactgagtagaaattgactaaactttgatttcctttttttaaatcgtgttgcatttgattcctgagcaaattccctcaaagtgaactcttgttcttaaattttgaattttatggtgagattgtaaagatagaggcaattgaaacattgttccttatttatgaactgcttgaagtgaatacttaatttaagtttgcactttaataccaaacttaaaaccaaacactcatttaaaagtaggttaagtgatcatggatcattgttattagctttgtggctttgtgaaattctaaaggaatcaaataattcatcatgatttaaattttctagagattttgatttttttataatgtttctttcctgtagattgtgttcttgtttctctctctctctctctctctctctctctctctctctctctctctctctctctctcaaaattacagtgttcattgtcattgacctcagcagcaaatttgacttgaattcacttaggatcgcaggaatcaggggaaagtgattttaaaggtggtttctccagcacattttaaga

SEQ ID NO: 139044 - DNA, 1095 bp, Homo sapiens
tggttcatggtttgagacttgagagtggacaggtgcctagttagacctgctctggatgtggaggtgtctggtgattagaatgactctttgtatatctgttccctctttaattgcttccttttaacctcaagattaggcttttattgcataataaaatgcatatgagccattcagttttactccattacctctctggcttagaatgaactatcagtagaattaacaaaaattgcatcatagagttggagaattgccaccaaggaagtgttctagccatactacagaaaagattctccccatgggattacttctcagtagaattctacaattcagaagataatatcagtaagaaaaacttaagtcctgtcagctgttagaaaaacatatccaatcaaaaacatactcccaagtagttttaattagccaatcttagaaacatcaaattcagaaaaagcaatttagagttgaggggagtactaacttatctggtctaattcaaagctagcagctggaattgtatcattgggctcacactgttgtttattatcactggacttggttataatatgtgagatctcagaattgaactaatcatattaatttaaacattcagagattttaggtctagtacataagaaatatagctaatcccatcccttctaccctgggttcactataaacatttagtgagcttgctttccttcatgtgtgattccacctccattcaaggattctatgccataggttccgcttttgctctctgtgtttaatgggtgacagtgaacacgtttaaagatctagtcctcccactccaaccctagtaagcttcatgagtattatgcacattaggatagagaaacaaaacaaaagatatttaacaaaaacataacctgtatcagaggaattccagcctgaggccagatgcagtggctcatacctgtcatcccagcactttgggaagccgaggtggaaggatcacttgaggccaggagttcgagaccagcctgggctatgtaatgagaccccgactctacaaaaaataaaaataaaaaacttagctgggtatggtggtgtgtgcctgtagtactagcggtt

SEQ ID NO: 139045 - DNA, 1520 bp, Homo sapiens
aaggcaaacttttaaaattatgaaatattaccgaaaatggtgatttttataattaagtctataatattgtattaaatcaatacttgcccccacctcccaaaactgatgctactggagaattgctaacgctcttatcttttgtaattcgttgtaactacttggaaaaagtaatacgcatggggaaacaagtagtaaaaacaaacacaggcaaaaaaaaaaaaaatgacttcttcccacccagactccccttgcactgtccttcccaggagttgctcactgttacagtagtttctagtgaatttaagtgtattgtaaggtgtttgattttactggaataaatgcataccattcaatttaaaataaaacatttaagtgtatccatctggttgtaactcttttattctaggcattacaaagtggttttttttcccacttaaaacactttcactcaagccctcttgctacatggctaggaatgcatagatgctgcaatcctgtgctaggataacaggtgttacaaggagtgatgacaagcaggcaggtttagggagatggccaaacatccttatgtacgaatggattaatcatttggaaacttgcttttttaatcagtatagactgggggtgggtaaaagtgattatatgagtcaaggttagtgtgcaacccatgttttatattcttgacaaacccagcaggtagggtctctggaaattatctagttcttacttcagtggacaaaatgatgacgatttctctgtttaggtgtgatttcattttggattcagctttgtatactcactgaggtatgactttttgtaatactgtaatatttctgttatggttatacaaacagcataatgtttttctttctctttgtgattgcttgaataggatatcaagccaatgagagatcaaattgtcagagtgaagagatatgaaaaagtcccactaatcctagtaggaaataaagtggatctggaaccagaaagagaggttatgtcttcagaaggcagagctctggctcaagaatggggctgtcctttcatggagacatcggcaaaaagtaaatcaatggtggatgaactttttgctgagatcgtcaggcaaatgaactattcatccctgccggagaagcaagatcagtgttgtacaacttgtgtcgtccagtaaagaagataacctcaatcatggccataccgagcaggttagtttttgatggaactgtatgaatcaggtagtgttttgttttttgatcaagtaaaacaaaaagctggttagtgttaatacatatggcactgccttaaatttctttatttttaaaataacattttccatcacacaaaatagtcaacattcaatgaagaaaatttttttaaatgcagataagcaaagcggagataagaaattgcttatattcccatcaccaggattttaagtgagttattgttcttccttctctgctttattggtaatatttctttgggttgagttaaaccataatacactttttccctgttct

SEQ ID NO: 139046 - DNA, 1851 bp, Homo sapiens
taaatacagtatttacttttgtaattgaagcatgattccacaaccagctgtggcattttatttcacttttctagatcagaggctttaatttgtagttaatcatgatgtggaaagtcatcttctctctactccatcaatttttttcatccgtttttgaacatgctgaagcactttgatcttgccataagtgttgtcctataccactaggtggtgttcactaatgggagggcctcagctcaccggctctccaatttgggaaaaagcaagtacctcctccctaccatcagcagaaactgaatgaaattaatctttgcaacttgaatctgttttaagtagcattaccaataagcatagtggtatctgaataaggaatgacatttacattacattttattaaataagagagaaagttaatgtgctacttgaaatgttatttggttctttgtccccctcattgcagagtatagataaggatgctcttaggtaaaatgcagccacaagttttccgagttcctttagtctgtagggtaggctatgaggtacagaatgattagaaactgaaatcctcattatttttctctcaaatacatttcacatacattgaaacagaaataggcaaaatttatgagggaaatctgatttcccaattctgatgaatagatatactaagacagtagccttgtttaaccagtgcctgtagaaggcactagaataaatagcatgtccaagagtataacaactttttttgtaaatttagttactagcctaatcaaactgtaaatataactcactaattggtaccatattttcatttttcttattgttcatctttaaggtttcattttattgcttttttgtagctctaagtaactaatcaatttaatttcaaaggaaagttaaagaaagtttaagcttttactgcatggattctgcccgcctagctaggttctgaactgacactgaagtatgacaagatacagattatagtccaaaactatcctttacagttcacaatttaagaacaaatttaactttatatacaaataataattgttatctaattatatttagttgttgctttggcaacaaaattacaacatggctacctttagacatttgtgtatgtgaacattttacttgtaaactataggtgatttgtgacagtatgagcctgtagaaaatacagctcaaaactatgaaaacagacatggttgagttcttttttaatcccaaaggcccatatataaaagctgaatttgtgtccttgtgtgactttttgtgaaaaagtttataacacatggattctagaatcaggctttatagtttatagaatttgttgtgtggatagggttattccacagtatttagacttcaaaacgcaatcattgcatttttaatacattacctaactttttttataacttaattcaaaattaccccattcaagtggcatagctgtagctgcaaaaattctgttttctggaattacatgagcaaatatagctatatgaggattaatgtatgactaaagcctcttttgaaattaattcatatttttaaaactatacataaagatactgtggaatgaccccttaacagtgtttaagaaacatatgctgcagttaattgactgtctcagttagggtgcggatgtgtgagacacaccttttttgcacttatgtacatagtccatgaaagcaatccttggagctttttttaaatgtaagaagtctgtgataatagtggaaaagttagtaagagagagttatttctaaggctttgaaaaggagggtgtttttgctctaagacttaactaaagcataatgttgctttgctgttacggaggctttc

SEQ ID NO: 139047 - DNA, 1004 bp, Homo sapiens
ggttctttcatgatcattctcaaaagccccatttcaatctgaaattcagattggggatattttggcactgttaacagacagaactggaacaagacccaccacactctcctgactcttccttcaataacctttcaatatttctcactctttctttctttctttttttttccatttcagctgaaattctgaacagcagagttatggagtatcagaatctttccatggaaacctccatatggcctttctatatatattctcgtatgtcttattctaccaacacaacaataagcgtgttgcagtcaatgtattaagcaaagcaaacctgccagccagcaaattcaaataaaaaataaagcattaaaaatcaatggagatgttaaaacaacacaaatagaaaactagtaactaccatccatcctatttgaattatcaagcagaacatgaccataaaatttggtaacttgttacattactctttgtgattttctaataaccatgctaagtgtatttccacagtgagcttttggcttactatatacattcttggtggataaattgttcatctgtttttgaagtgttaccttactattttgtttacaagatagtctattgggttgattcaggatgtaacaaatatattcagtaccatttcttgtgttgtattgtgttgtgctgtgttaggtttttacatactgtagtgttttgctgtatatgtgtggtgtttgatttcaactaaagtgttattagtggggaacagaagtatatgtgcttaagaacatgacaggttcatgcaaatatgctctctttctttagaatatttctgtaggtttcttgggactgacatttaaaacgcctcacttttgaatgtgcacaaaacctgctcattaacatgcatgtgtataatttgtacctgcagatctgatgttgcataatacaatcaaattactagattttttaaagagagaaataattacctgcacaaagcagagaacttcataaaacat

SEQ ID NO: 139048 - DNA, 1329 bp, Homo sapiens
tgttctgattcctggaaacccacctcttgcaatgccaggagctgttggcccaaaactgatgcgttcagataaactggaggtatttgtgaacatatatataaatacctgtagaatagatattaaccttacacataaagcagtattctcagagcccagtgtgttgttttaaataagagaacccaaatttcttagcttatagggttgttaaacattttagtactgcaatcataccttgttataaagtgcattgattcacctgtatggtaggtcaaacaatatgttaagtgtacccagccatagactgtgcgatggcacaggaagcctctgtgggaatgttccttttacctaggctccagctttcagaaacagattactatatttgttaatgagtctctacttgctagaataatcaaagtgggaaaaaagtagacaatataactctctacgattgcagaatgtaaagctatatgaacacagaaggtaaattagtctcatagtgcctcaacttttttctccattttgagagtgatgtgctaggcagtaaataaccccgatgcctaagaaaagaaaatctgaaagaaatttcaaacagctttttgatttattgaagtccttcattcttctattgttattctttgtacattgaaataactagtctttccttacaaagtcagctccatttgcagccgcttaaatgcctagtaatgtattgtaatataatctgattgtacatataactcagttatggttcacaagttgactttggaaaaccagtgcattatggtgtgataaagactcatcttggacttaaaaaaacactaattatgcttaaggctgtgtattaactggagaattaaaactggttttcagtaatacttttttaaacatttttatttcaatgtaaggacaacctccttttggggagaatagaatttttttctgggaatagaaattctgtctgtttatatctcatagtgaatatggctttacattattctttatctttttagatttgttcacacataatatattcaatgtatatataattactgttacattcactagcaaaataaataaaagccagtcagcttccagtcatcagtgtgatgcgtgtgtatgtgcatgtgtgtgttctaaggtttgccgagaatttcagcgtggaaattgtacccgtggggagaatgattgccgctatgctcaccctactgatgcttccatgattgaagcgagtgataatactgtgacaatctgcatggattacatcaaaggtcgatgctcgcgggagaaatgcaagtactttcatcctcctgcacacttgcaagccagact

SEQ ID NO: 139049 - DNA, 1072 bp, Homo sapiens
acttggagcatataacaaacctaagaaagtttaaaagtattccaaagaaagcagaacttagctaggagaatttccctggtgagtcacctcaaaaaagaaaagaaaaaaattacagaagtaaaaagctaccataaacagaaagcattgctttcaaatacattaggcttcaatattgttgattgatcagcatttattagtgattaataactttttaatctggaaaattcacccacctccaggtctttctttcagttcaaaaattaatagatacaataatggtcctgctcatttttgtaaaaggcaagagcaaaaagtatgcaggagaatgggctggtggcttcagtgagaaatttaccaggaaagtcagagacaacgaaaagtcaagtgaagagcactatcgtgtgcttcaaaaatggactctttctcatcagagattcttggtgatcttgagacaactatgaatcattacattgataaagtctgccttattgcggaagcatgcctgggtggctgtttccagaagatttccttctcattatataaaatcatgtcacatcagctagttcctgagcttcacatctcattccatgacaagtatcccgtattcctgtagtctattacatcataagagctagttagactgggtcagcccttggctatttgcccccagactttagagtccttctcctgactacaccatcatctttcctggcacctggcgttccctttccacttaaggctcttggcaaccatgtctttcctactcaccctcgtgagtcttgccagttttttggtgccagattctttctgcccttcctaatgtcccaatcagctaatttgataaactcatctaaggtagaatgctaatgggggagtgcttccttctaagctgaatatggtttataacagagtcttcttggaatgctgtgtgggtgacaatttcaagtctgtgtgggggtgaggcaatgagtatacattgcccttcactttatattccacaatttgtatttagacttgtttctattaatgtgacttagcaggtatgggcacagtttggcaaatgcaacagatt

SEQ ID NO: 139050 - DNA, 1053 bp, Homo sapiens
gtctgcttacactcattatatatgttgaaattgcgtagctattcctaggctacttttaagaatttaggaggattaggttaacgtgattcttaactcatactaccaataaattattctttctccaaggtttgcatagaaatataaaagtacataaaactaagatagtatttgattttgtaaatcactttaatttaattaaatgtaaattgagcaatgggaaaaacaaaaagacaaactcgacagaaaacaatgatgtgtcttttaatttctcacactgactttaaagttatactcagcttcttgccagaggaggtaaaacaatagagccaccttgccctagtgatctaatatttaaaaagagccgttgcaatgcatctgggtttgcattatatgtagctctagaaaagttttgaaggacacatcttgattctcagtgaaattataggaatattttaataacaacataactaaacaatggagaagccattgcataaactgtgtaggcatcataaataaggaaaatgcagatagcatgtgttgaatgaaaacacttggtgaacaaactcatttttctctcgggaattcaggtggcctagcagcttgcactctttggtccaaaaacaaagttgcccttttgctccccaccttccccttccccaataacctcacctactgtaaagaatcttagcatctgtggaaaatagaattgtttgcagttgtgctttcttaaaaggtttatggtggacctagtaatccaaataagagagaatcgttagcttctttatatactgctcatgagttcaacacagtaataggtcacattgtgacaatgtgaccaacaactagtccagtgacatcctttgctgctacatagtaaaccataatcagcagccatgccaacatttaggtgacaccaaaagcatgtttgattccacggaactgacatactgtcctgtcttgaaagtgcttaacatcaataaaaaacattcaattagctgaggatccaaaatacactttggtttccatcatgcaagtgatctagggccattgtct

SEQ ID NO: 139051 - DNA, 1110 bp, Homo sapiens
aaaattgttgccatttacagttgggtaaactggtgatccgttgagggagagtgacttgacctagttcacatatgcagttatcaaaagagcttgatgactccggcgttcttccaatcattattcagtcttctttcctgtggagaagaaggaaatggagagaacatcaattaggctattgctttagtaaaccaaaagcatccagctcttatcacagtcatgctgctccacatgacattgggactgtctgtgaagttttctggttctcctttactttttgcactataaagtaaggcgtggataagccaacttttcctttgctaatccctccctcttttattgtttctgattcatgataatttagattaagactttattaaccttcatatttagttcatggacaattatttggataacttgttttgaaaataaggcagaagagaagaatttttagacaaagttacctaactttgtgatactaaactttgcttaattgctgagtgtcagaacactgagctgtctctgctcccttgtccatccttctccccaaacaccgcattgttgagtttgctgaccagaactggggattgtaactgtggctgtgtatcacatcttcactgcatgaaactcattgatgtctgattctgttatatactcattagtacaatgccctggccagctaggaagaaacctgtcatagatcagctgaaatattgcagtagcaattcagccttattatgggtcaagtattttatacaataatttggaatctaatccaacttatttaaagtgttgttttatgggatcatagctcaaaatcatctcttcctggccaagttgtaattgggcatctggtgagaaaagacttgggctagggccaggcatgtattccccaactactgtttgatgttaccattaatactgaccctttgctacaggaactccattaagtaggagagatttggaaattggaaatttgaaaactattatatttcaactcttttgtctagaagaaactcttagatgttagggtaatatacatctgatcctacttggttagtaaataatctcttcatgtagcatagctgaaatgaagtctttttctctatatca

SEQ ID NO: 139052 - DNA, 1070 bp, Homo sapiens
gaagcactctacctttatttattttgattatataaaacttttgcctgtttaattaattgacattgctactgtctgggtaagttttactatagtctctaaggatgctgttacatcagctctgttttctatcccttgggcaactgttaacttttttccgtctaggtcccttgcactctcccacactttatttaaagcttcaccttggctgaagtcaaacctaaaacaccaaataaatactataattggctcatttttaacattttctttgaattcctaacagcccatttaccatatctgtcattaactgggatcttggctttattgagtgcctacctcacaccaagcatttgcacatctgtcatatgacttattcctgctaggaaactgagatactgagtttaaatatctggacagaggttcaaattcaggtctttgtgattctaaaccttattctgtagtgtatacaacaacacactttcttcacttctctgggtctggtcttagtttcctcacctgcaaaagggaaaaaaatatataaaaagtagactgagagcctattaagtgttaggcaccaggctaggttctgctctgaaggggttcacagaaatagacaactttaatttaatgggttcatggtggtgatgtctgtttgaacagtgttttgagtacccattgatcccttttacttggtgtaaatcaaaagctggctctcgcagaataagtaggatttctcccattctaaggaagcacattccataatcctataagacctttaaatatatttttaaaaatcaaatttatgttgtactcttctttctatacacaggtttattaagtatgtggcatggaaattatagtttgttagactattaaagttcatgagaacaggaaccatgtccactgccttgtactaatacttaatacatatttggaaaacaaatgaaagaaaaaatagttttaaatatggagactcttacacaactgacaatttgaagttttaatgagtaactactatatagtgcacactacctttattatttatacaaatttcaactcaactagtatttatt

SEQ ID NO: 139053 - DNA, 1047 bp, Homo sapiens
ctccttagcatataaaatgtatttggatagtcaatacaataagacttttgtgtggttacatctttagttgatacagcaccattccacttaccactaatggtcttgctgatttttctattggcccgaataagctcgtaaagaaatggcatatggaattaatgtttttttggtgttttaagtttcacttctgagttcccacctagatgtgaaaaccaagagccccttcattctttactgttattttatcaacctttgcaattgtgaggagaagatattcttgattttaacttagcatcatatttatttacattgtatgatcatattatttcttttcactgagggctactgatacattttctcaggtgcattgaaatattaattaagtagaacccaactgtctgaaacccacagtcgacagaagttttatttgtatttgattattaggaaaaatttgaatttaccaaggattcagtgttaagaaaagtataaccacgttctttagtaatgagagaaagttttaattccgtttacgatatgctgtttaccaagacaaaaacaaggacttgtattttgaaatggtttctatcaaaagtggtttttagtaaccatgattaaaaaattaattccgtattttcattaaatgaatctatttcacatttctactgatttccaacaatattgtgctttatcttttcataaaacagaggaagaaaatctatttttctcatacatccattttttatgttcataatctcatgccacattattctcccctaaccccttaaaaattgcagacaaattttttagggacagtgatggcttaaccttttttaactttggcacatatacagatcatgtttgtttgatagattataaatgagaaatttatttatttctaaatcttacacagtgataggaattgctatgcaattgattgagttctaataatctgtatatcttaaataccacagaatgagaaaaagcagtcattgaaaaggcgtggttttagtaatttcttaacattttatgggatacttttttttaaaa

SEQ ID NO: 139054 - DNA, 1539 bp, Homo sapiens
ttcctaacattttgtttggagaactccttataccgcattcctcattttcatgaaatccaaaagaaggttgaaatgctgtattgctgttagcagagttttccctaaactagtaagtgagggaaaccccttcttcccaagaattgcaaccattagcactctcaggaagcctgcaatgatttggacataaggaaaacaaaatatatacaccttctatgtactcacaacattttttaaaaaataaaaataaatataatcatgttgaaaaaaaaacacttgatcatctcagatccaggagaggagctctggctcatattattcctcatgttggataatcattaaaacagaagaaaataaaaccctcttgaaatggcaggttttttaagtgaaaataagtaaggtttccttggacccctataaggagactcttgtgaagcatgcatccagacttctgagactttatactttttgctttctagagcaggaaagacttaagaaataggaagtcagaaagtacagtaaaaatctatgggttctgtgctgttaagggtccctttctgattggcttggtgtgaataatggtatagaatttaaccatgtaagatgttagaggcctgagacttcccttgacatttccttatgctggcaggcccaggcagtttgactttggctcttgtggcacttgggtggcaggagaaacagtgtttacaaccaccttcacctccaggaatgtattatacttttaaatcaatcttagtatctgtaggcaggagtttatatataggaataaaatttgaacccccattttcacacccaataaaaacgtcctgtaataggtgtttattcagagtcaactgacatttattgaacaattactgtgtgccagatgctctgctaggtactttcattttgttatgacagtttttttaagttatgaaatacagttggttctagctgggcaaatactctctttggcatctaatagatatcaggctaaaaattgcatcctcaagtccctgctcactttttgtataaaacacaccccccaacacacaatcatttcttctctgtcttgcttcatcatttgggaaccatctaatggcccatggcctgcctcttccatccatgaagatatttatttcattataaatcaagccaacactaatctgttacccatcttgatgtaacaaaaggctgctttcactgtttgatggatggtgctacagtaggataggagaaacaggaagaggcttgagaggtggatgaagagtgaggggtcaggagtgtgaaatgatgtggagttaagtgctagtgaaagccatgtagaaaaatctagaacaaaattggattaaacttgtccagaatgcagagaaaataacaaggcaagatgttggaagttaatccctcacccctaggagtggccaggacagcccaagttgagcaacacaggaggatttttttttgttatagaagcaaagggcaaagaaagtctctaaaaggagggagcaatcaacaaataccacaggaattatgtaagttgag

SEQ ID NO: 139055 - DNA, 1077 bp, Homo sapiens
agatggttccatgacattctgttcttcctaaatggttatctattgcctcaagatagccaaatgacagtgttggaaaggcaactttgagaattaggataaataaggtatcagttgtcttaatggatgttaataacatccacatgacctgaaagggataagaaaatattttttcagatcattgtagtaaaaatgcattattaactcatcatttagatctgcttggtattagattgagtgacattgtttttaaaagattgatggagaaaacaatacaatctgggaagtaggaccttatcatttttatttgagaaataatgggacttccaaattgcctgggcacacaaacacacacgtacatgagtgtacaaattagtggtcaattcaaaacaatgtatacagatgtgcattgctttctcactggaagattataggaaaatatttttacagtattcctccaattctaagaatgaaataaaaaagttcactgtaaactattataaatatttgatatagtgatgtcactctgaggctcaggaaaagaaccagggctttgaatgttcaactccaggcagttaactttcagaaaaaaataaaaaataaaaagatgctttgctcagaactcaagaggaagcaagaataaaaggaggcttgatttaaatgtgtgtgtgtgtgtgtgtgtgtgtgcgcgtgtgtattctccctttgtatgtgtatggtgattttcaggaagcccaagcataggactcagtttgacatgcttcctaaaatattatgtcaactctcaagttttacttgcatcagtattaagttggctcatgaggaaaaggaattatttgttttctgatttgaggcaggagtttgttttttgcccagacagtgagtgaacttgaagggcttagaaataaagggcctcccatagagaaaaggcaacctggacagaaatgcagggggttggcagtagagactagaggtcatttgatctctttaagccatgggagcatcctggagtctgatagttggctggattttgttttccatttaggatcacaaattagcttaaaattgtccacattggat

SEQ ID NO: 139056 - DNA, 1011 bp, Homo sapiens
cttgcagaaccttgtctcttcctgccctgagtcaacacgtttgggcagctcgcttttactactggggtttgaagggcatgagagtagattttaggagactattaaaaagggaactttagtttttaacactcacacaataagcttttatggtaagaaaacgaaattaaacccagacgagtaatgaaagttgacatttaagtgattctttgttgtggtttcataattagggtaatagacctactgtgtgtttttctgagcactcttagatagctagctagctagctagctagctagatgatagataaaacagataaattaattgtggctctaattaaagtaatatgttttaaaggagttattttctcctagatgttcttacatcgtttgtaaattgagctgggatccccacagcctctccgtatttgtgggtagacttcatgggaaagaatcaattaaaacaaaacttgcaagatttaattttgaagtgattggtactttttttattaagcggactccctgctttagtgaataaacgtttgggtgattactgatataatgtttggaaaacagattgttggtatgtgggaatgactaaacatccatgcttgatacaatttatctgaattttgttttgttttgtttccccctccagtgaaaggtaaatagacaatgaggcttatcagacaccttggatttttcctgattatatttccatcttctccttggcccatgaaaatctaatcctgaatgtttaactactttttaaaataatttttaacttttttctaatgtgcgatacttttgggggatgctttcatatttaccaacacttcttcaaatatagactaaaatgggcttctgcccacagctcagctgataatattctatcgctgttcactccttctcccaaagcagtagaaactacttggttggcagacgctctgctactaaatttagcaagtgtgtggaaagggagaaaaatattgttttgcccttattaaagcatggtgc

SEQ ID NO: 139057 - DNA, 2023 bp, Homo sapiens
caactaaaatgaaacataaaaccttttattttcttctgattttaacaaggaatctatttaaatagaataacaactgatggtgaatcttaccgagctgtagaaaataaaaaattcctctccaaacatgggtagttttatgtcaaaatattggcttttcaagaacaggactcatatcttgatatttaagagatgtttaaaattttaaactttttctaccttctactgtttaaaggttttacacagggtgtatctcacattaaacaaaacacctttttttcaaaatgaaataccaatgtaaagatctaatttccaggcgctttcagggcactgtaatttcaacaatactggaatcattttggcgctgcttctcattcattttaaggcttctctgaattgtgctcattccaaattaacccatgtatagaatctttcttcatcatctaaatggtgtgttgctgaagttattgtggtatataatcctggattaaagtcaggactttctttctatagaattattttatcaatatttgtgtagtgaggtcctaatcaagaaacttgaacaggataatgtgtctaaaaatattgctgaagttattcttgatcagatagaatttaacctaaaatgtgaactcttacttactttttgtacatctctattgtaatgtttccagttgggccaactatttctagccctttagttctttttcatgttgacagatttgtagacaattacaaaagccaaaaaaggataaaataagcattaggaaggctagccagttattcaatagcaccttgataatgtgggcaaacccttctacaaagtttttgttttgaaaagagcaaaagtaaaaagtgttctgtagtgaggttacatatcaggaacatatgagttgagcagagtaatttggtagtgtaagtcgatgcaaaaatacttctatggtacctattacaagctgaccaagataaaaagaagtatgtaacccactgtgctgtcaagcatcatgattccgggcagttttcattttactgtggattttgctatacttatgcaaggacttacactaacctcctggctgtaaatcaaacaaggtgactgaaagtggcatttatgttttcacaagggacatgcttagaagtgtgaccataaagtcacatcttgtacaatctgctcatgtgtttcatctgtagtaatatagccacaaactggacaagaagctgggtatttgggtttaaaatagattttcttgactctgagcttgtatcagtatttctagcttttgttttgtctgacagtattgcagtcttgaaaatcctgagagctaaaaaactgaaaggaatttttccacaccttgaagtcacagtgttttagagtaaaactattttgtgtacaattgtgtttttaaaatagttagtagatcactatggtatttcaattttctttagttttaattgaaaatgtttgcttttaaaactgataggtattgttggaaagcaggatgaagcctgagccagtggaaaagcttgttacagaaaaaacattttgtgttattgctgtggtgtgcatgatttgcaaagattaagtgcattttctctgtctatactgattattgtatatagaggatgttataaatatacatatacatttttgccattatgtaaatcccatgatttcaactgtaaacatctgtccattggtgtagctttacaaaccattcactgattttgtgtaatttaacaatagatatgaaataaagtttaaattacaggctctgagtaatctcataatttcaagatttgcagctgctagacattgtgatctcacaaaccagaacagaatttttttcaacaagacatttccttttatcctcttggcagccaggtatgaaaattagatggcccattctaatccctcacactaaaatggccttaatttggggtgattccttctgggagtccatgttttttgtacaagcgtgtccaacccacaatggtgctcttcattctcccttctatccacagggta

SEQ ID NO: 139058 - DNA, 1050 bp, Homo sapiens
gaaatgtcaactgtcttctttcttgttaactttccctttgtttgcttatctctccagcaaagttctggctgtggctccttgaggaagagtgggagtacttctttatcttccacagagcctaccaaagtacaaaatgagctctcagtgtatgcgctgatgtgagtaaagtatctgcagtatctgtagtaaagtacctgcaaagtatctgcagtaaacagaataggtatacaacacatgccagaaaagaccacctattctcttattccatcttatagcatctcataaaaagtgcatgcactgcaactcgatatgtgaaaaagttctaaaaaaaatggatacataaagaagtattcttcctccttgaactttaaagattcttgagcttattttaaacaaagagcattttgttgaggattttggtattgagccaactatagtacacattgcatttccctgaacctcatgatgttacagagaggggctaggagcacttctggggtacacttaccctacaggcacttctatttgaacctactgcttgtccctgcctttctgaatctgagaaattatacctgagagtactttttaaaaaccagttgattgaagtatgattgacatataaaaagctgcatacatttaatatttatttatatttaatgtatatatctcattgagttttggaggtaaatatacatctatgaaatcatcaccatcattaaggacataaatatatctatcatgccctaaaggtttcctcctgccccatgattattattgttttgttttttgataagaacacttacaacataagatctaccctgttagcaaattttacatataaaatcaagtattgttagccataggcactatgctgtgtagtagattcccagaacttatttatcttgtgtaattgaaagtttgtaccctttaaccatcaccacccccttgcccagcccctggtagctaccattctcctttctgcttctatgagtttgacctgattgtgcttttgatggatgttagaactatcttccttgacctggcttcagc

SEQ ID NO: 139059 - DNA, 1066 bp, Homo sapiens
tgcattttcatgtttgacttcagctgtttctatgtccattgctggcaccagagtcctgcatattatatcgtgattatgttttttcctctaattgagacccatgtattttttctaagacattgggttgtgactgttgctaacccccactaattttgccactgtgtgtgtatgaaagtatgtgtgtgtatgaaagtatgtgtgtgtgagtgttctcttcaaaatggttgtatgttgcatgaagatagcaatccactggccaagtatttgactttgccagtaattgctgtagttttatgtgatgataatgtcaatagttccttagtttagctactagactaagtctaatatcacaaaagcttgtgacaaatgaaagcattaatattactgcttattttttcttttactttcttttttcttttttgcaattgcacctttgtagaaaaagacgaatgacaaaagcataaactgatgtcagaatgtattcctaaagatggcttttagtggagtgtgctcaaggatgaattcatttatagcctaactaccttttccttcagtagtcccccatccagaatagtgtgagatctttgatcacaacaaaaaattccagtttatcccagaaagtgcatttattaataaggcaggaaagtagcctaagctatttgaaaaggactttcaataaccggggataaataacataggctggacatgctttgatatttaacctagtgctagtcagctgtggcaaagggctgtttaaagatatctttaaataaattaggcagccttttgtgtatttgaaagaacatcagctttggagttaaatagacctgtatttgagtcctgactctatcattcattaactttgtacctacctcattgggctgttggtgaggattaaatgtcataaactaagtaaggctctcatagtgcctggctcgtgacaagccctcaataaatgtcaactagtgattatgcttgtttcagctgccaacgtattgcagtgggggacagtgtgacctggccagtatgattctgatgagctctgtttggctcagtttttctggtt

SEQ ID NO: 139060 - DNA, 1072 bp, Homo sapiens
tgagtcaggtgtgttttaagccacagggttcttctcccacaattagctttgaccaaacagcaaaactcagattggagtgggtctgattgccattttggtttaagtacactggataccatttcagcatcaaatcattcaatcagaaacactgaaaatgctgaagagttgggttagttgcaattttcccacctgaatagaatgtgcataatactgcaaattgttttttcacttttgtagtgctggagacatttatggaacctgtgggaaagggttttcttgacagatggagatggacagccaaccagacagaaggagagctagcactcattaacttttcccaacagaaactcacctgtaattgttttcacaggcctttaatgaggcttggttgtgaggcactagagagaggaaagcagcttatccatagaaaaggatagctactcaggtgaggtagaggaagcctggatccatagccttggaaattgtaggacataaggtttgagattacaattcaaagacaagatgaaagtgatgagggctgacaagtagtctagagatgggcaaatcaaaagaataactactggggtagatctgtttcggttatgtaagttaggaactctaaatcaaggagcacccacccccccccaccaatctcatatatccaaaattatatctatgtgtctttgaaacaggttggatttattcttgtaaatccctgggattgcgggatgtttcagtgaccagagttcttggcaggatcttaatctttaggtctttgccccaaagatctttgaagttcccagacagtctgcagctgcagtattttctctttatttttcatgggacccttctagaaactgcagtgtccttgatatcactgctttagatctccttctctctcaaagtttcagaattatggcatcttgcccaggcttatctaactgacctggattttggtggaggaatgaagactttttctgtcaatgttaggtaaacttttctataccacagtcattagtacatctacaaaattaagctccgaggatccaagccagccacaagttcttcttga

SEQ ID NO: 139061 - DNA, 1024 bp, Homo sapiens
tgctcaggctggtctcaaactcctggcctcaattgatcctcctgccttggcctcccgaattgctgggataataggcatgagccaccatgcccagcccttaaattctgattatatcagagccaagactttcttgacgttttgaagccaagttgagagcaaaacgacccatttctgattttctacataataaaggaaacaaaccaggaacaataatcaaaggtggattttttgtttctttgggaagttataaccatatttgcataaactttaaaacagttatgacatctagttgaggtactaaaacagtttctttttttaattaacttttgttgcaataaataaggccagactaacaaaaatatatccaaagccaataattctatatttgtttggcacatgttgcttccttcagcatacttcaggtcatctttgccaggaattgagaacaggttgcatgtaattacaaaggctccttggtgggatgaaggacaggatgactgacgaaataccacagctaatcagataagtgcaccagggaaaaagcaacatgtaatggctggaaacccaaaacacaagactttttttttttttttaagacagagttttgctcttgttgcccaggctggaatgcaatggcgcgatctgatcttggctcactgcaacctctgcctcccaggtttaagtgattatcctgcctcagccttcccaagtagctgggaatacaggcacccaccaccatgcccagctaatttttttatatttttagtagagacagggttttcaccatgttggccaggctggtcttgaactcctgacctcaggtgatccaccgactcagcctcccaaagtgctaggattacaggtgtgagccaccatgcccagccatcagcaaatgagtctattatgatgggaatactcatgcccccagactagatctagtttctcctttgatcccaagccttctggtgttgttctcctttgagcccactgtcccttctctggcctgtcctccttaatcttcttc

SEQ ID NO: 139062 - DNA, 1752 bp, Homo sapiens
tatgcttttaaataacattatatttaatggacctttgaaagcactgacatatgaatccattttctcacctgtcagcagaactgttttcattaaagaagtcagtgaaagaccacatgctgagaggagctaaaagttggtggcagggaacatttcagcttggtatcttgtcctttcacctatatctactgtgaaaattaatgaacagttatctaggaatactaatattaggattgatttctaatcaaagggaaaatgatgtcaaagcactatagtgaataaaggaatgcaatggatttatttttaacaaacatagcagaactgacataatggaaaagggtgctgatttcttcaacatattcaacatttgcatgttgctgtattggttagtacatttgacagctgtagcatgttctcttgactctgcttggttgagagatatctttgtcctttgagagtggattgaattttgggaatcagtcaaatgtcctgagaaggtaatgatgatgtactaattggatgatcagactgggtcctatggttgggggccagaagtgaggtgtgactacacagtcatgagtgatatttctcatgtggctcataactgtctatgaagatagttcccagggaacagctctggaaatgtgaacgccagcagtatccttggaatctgtatacagcttctctgggtaacaactttgagaggaccagcatgcattgggtacaacacaggccctcgtgcgcttgctaaagatctgcttcaatactttgtcacaccgcctacactggctccacatttgccaagtaactatgagcatggttctccttccaacaatctggatggagctagcatccttcatgagtgtaaatttacaaaagtttaattaatatatcttgcttgctaatgagttattccttttgactccatagacatgcagggccaaatacatgatgtcagaattccctgagtgaattattgagcttgtgacaacctgggtcagaatgaaaaatcaccttagtatatttaatccagaagcaaataaagggccagagaattaattaatatgggttttaatttgttaaggtcttaagagggagcctctgtttgctctggtacctttttgtgtgtgtcctctttgattacaggtgaacatgcctttgggaaaagatatctacttctttactgtgctcctcggtaacctatagacaagaaagaaaaaagtgggttcttagtcttcagagagcatcaaatcattgaatttattgtttaggtgatgagccaatgccctgttcccaggaataggtttcatgaggaattgctaggaggcatagaaaaagaattgcacatagtggaagtagatgatgataaaagaaaacaagtgctagagctggacaacagagcaacaccccatgagtcctgaacaaagaactagaaagaaacccaaggaaaatcagagtgcttctttgcagcctttggctaagtctccctagctcccaaaaggatgtagacagcagataacactgctgatgagagggcaggatccagacaggtgagctgtgctagggaaggggctgccaaggaaagccccaaatgcaatggtacaaggtgatccagtgggagcaatccttcctattgtcccatgagcaggtgctttagggagccactggtccaaggcctgcattcaaattcatgcctcctggtttttcaccatctttccaggatcaggttagatcacagaaaggccgcccatttgc

SEQ ID NO: 139063 - DNA, 1044 bp, Homo sapiens
gatcgttctagacatgtccccattaaaggatatctaatagagatggttttgtaaaatgagaagaagccaatgatagccatttaattacatctttagtgtgacgttagctccctgtcttgagaagcattgatattctccatgggtgtttacttgagcaactactctgccaggcactgggagtacagaggtgaattagagagagatcctgtctttatggagctcacattgaatttgggagatagaactaaccgttgtggtagaatatggttcatactaatatgtataaacgtagatacttggtacttcaaggagtctgctctaggttgagtcgttgggtcagaaactactaagggaactattctatggtttgctaaagctagtgatggggcaggtatgttcatttcttcacctcatataaatatctttggactcttggcatgattcacatgcatacactttcaatctatctgccagttttaaaggcaggtataatggtgaggtctagtttcaaaataagtagcttttataggtaatattctgtggtttcttcttgaatgtagaaccagaccgattcagaataactctcatgtgacctgttgtgaagagccggccttaatttttctttctctttttttctttttgcaacaccagctccatttctagtagcaaatctgagccaaaagcacagattcattgactgtttgcataagacactaaatagacactgaacagaggattaatgtagccctgtcttctgggagcttatagtctaaaacagacaacaaactggaaagaatatccaacacacctgatatgctcatttcccttctcatataaatccaaagaaaacagaaagtggcaagtcacattctacaggattgggaaaatcccctagagagtattttctttttgtgacttttcaagttaaaaggtattttgtatatgacatgtaatagattacagtgttatttgatgaaaatgcaagcaatgttcttcctttcttttttactatcaacaagttacattggaaggtgtggatcaaat

SEQ ID NO: 139064 - DNA, 1695 bp, Homo sapiens
aggagtacagatggtgagatgggaaagaaacggttttggtaaatatcaatggggccctttttgaattttggtgagctgaatgatgtatgaaaactatttgcaaggctagcatatttttcaaccactagtaaagcaataaaacaaataacatttttggtaatccccattgtatatgcagtttcataaatatacaagattatgattatcgctgcctcataattaacaatttgcataagtacttgctattttttagttgtctgaatagatttttgtaatccagagaaagaagggaacaatcagtggaagccatcccaaatgcctagtattattgctacacacttgcacaattaacagcgatactaattgcttcagaccagaacctcatttgtttttctaaggacagcaaaaacattaatagccagagtgcctgtcaatctctctctctttttcctatagccaactgtatcatagggtctgcagttgactgtaagcaaattattttgttggattttcagtgtatcatcttgtaatggagtttccaagtttcagttagcaatcaatgccttgaacagccagacttatttttataatattttaacaatagacctctataaagttaatgaataaaaggatgctgacatgccaatcagttctgctgctgcatttacattctactacatatttcatatctttaaaattattggcattagacctgcatataagaatcatagaaagtccaggctggaggggagctttaagatcatcccgtcacactccctcctttttcagatgagtatgattgtcagtaatttgaatcttgataacaaccaccaaatcaatgatgccacacttttttttttttgtacctttcaaacgttgggaactattatagtaagtttgaatgataactggttgtttgggaatcatatagtttcaacttattttcaaaacaactgaatcagaattttaaaaatatgccctcataaggcttacctaaacatagccataatgttgatggtatatgtgtgaaaggagatgttctatgcaaatcacctggcaatgagacactcaaccaatatcagctctctttccttcatgcatagattacctaattaacattactatagtggaaacattacatcagtgactgacagtctaggcgtttagagtcaaactgacctcgggtccaatcctggcgctgctactttccagctgtgtgacgttgggtaatttagttcatctctgttggcttcaggtagttttcttatatgtgaaatgtagccagtatataggcttgttttgaggattaaaatgagatcgtgcatatcaagtgcttagcactgttcctgtcacatagtaaacagtcgataatggtggttattaccatcgttttttggcatacccagcggcagcctcactcaatagtatatttaatcttacagtgatttggggtacttacacatacacctgtacacatgcatatttgggcacacaagttcataagatttgcatcagaaagactgctttcccaaaggttacctgtgaccaccatgtttcacaattcaatggcctcttccctggcctcagtcttcttgacctctttggagattctggcacttttgcacatattctcttgcttgaaagggttcataatctatcttgatgtcttctctacattccttaggtttcctttgt

SEQ ID NO: 139065 - DNA, 1044 bp, Homo sapiens
atcaattatttgaaaatatcagggcttttaacgtatgtaaatacgtagacttgcatatttacaagtaatcccataggccagaggcctttttgacatgaagcctgcaggagagcaaatctaatcaaatacaagaaagttcctctctgtggggaagacggacgctgagaatgctcccagatgatgcccctgcaggcaacaactgttgctaagagctgtaccatcatattgccaccagaaccggagagtctagcaagaaccataagtcattttggaaatgtgtgctctagtcgcttggcacattgttttctaaggtcatgatgctcaccagtactgtctttggctttttgtaggcttattggctccagaaatatttactagtgcctctgttttttcttaatacccacctacaatccaccctgtgctccctggccaaataggttagcaagagcaaagactgtagctctggcatttctccacaaggacagactcccattaaaatagactacttgagccattttggggatgcccagtttagctttctgtagctgggcttccatactcccattagagcctcaatggatttacttgacagctgagaatagtaaatttagtgtttaattttgtagtcagattataatttattgagctaaatggcacagacacacatagacacctaatcacacagtattagtatgggagaacatttaaatatcatagattgggtgtgtcatggaggcaaagtaccaagttctgttactaatgaggtgacttttgtcaagcactagctccactctgagccttaatttcctcgcctgtaaaataaaatggagcggatgaccattaagacaatggtcaataacataggtaccactatccctataatagcttttatggggaagtcttgagaattttgttttctttttgctttaaaattgctagatgataggaccatctctttaaaacagttttgctgtataacaaagcaaatcctgacacactctttatttttactatggtgttgattagttggaccagattattgcc

SEQ ID NO: 139066 - DNA, 1127 bp, Homo sapiens
gatcctgaagacaagagcagtccaaagttattcctgggaagtgagaatcaggcatcagccaaggctttgtcagatctgggtttgcagatgagggctcattcaatgttccttacaattgcaaaaaaatggacatgtgaaaactcacttgtaacttgaaggggcatcatttctaattgggagatagccacagagaaacgaaggggccaaaacattgctagtgtgaaaagcacataggctttggagtcagatcaacctgcaagtcccattctttatgtcttagatgcatgaccttgtccaaggccttcacctctgagccttgatttcctcacgtgtaaaaggagataggaaagagcatcctacaggggctattcttctaattaaacaatgtccagtcctcatgcctggatctccgccactggctctcaactcacctttttcctcctatctctctagcatagattgctgcgttcattttattgtagagggaccttggtacttttaagattcctgaactggaattcacaaggtctgagagatggttttgaccctgttatgactgtgtgaccttggttgagtccctttctctctcaggacctataaaatgcagagtttgggcttgatggtctttaagggtaccttccaactttgataggtttctaaacgatgtcaaggtcaaattctgaatggcctggttcactgtgctagaggatggccctgatcatttggcaagcacaactctttcccaaggcgacattgcccttcttaccattgtagttacatgggccctgctggaatgagtcacatactctagcttcttccagtttcttcccccccttggttaacttggcttggacattttggattctgtctatatgtaatttgattgcattttcctatagataagaaatataggtataatagcaaggagcacctcaccccccactgcttcaaagagagagagagagagagagagacctgatctgtctgccaacttctctttccctgtgggtccctggcctatccactgctacctgatttatgtcctaggggagcagcatagctatggtgaagatttataccaggttttcatcttcaaatgagctactacctctgttccttgtgtattc

SEQ ID NO: 139067 - DNA, 1044 bp, Homo sapiens
agtcagtataaaatctcttggtaggtcccacttccctcgccctctctcatagctgaagggtgaggtgaggtaagcctttagcaatgggcttggtatgtaagtggtcaataaatgctggtttttatgattatcaatcgccatcaatatgatagttactgggaaattgccctagttcttcagtcactcctcagtaggacgcaatttccttagtgctagtcattgcagtcccctttttttggttgtgttttggtttgccatttactcccatgtggagtgtgggatacaaaatgaaccctagatccatgccctggggcctagccttttcataaccctgccccactcattcctgtttgcttatgcagagcttcccgtcaatgaaagccccaaggtcctattgtaaggcctgctgtgaaaccaggtctcccccagcttctagctaattgatattctaaaaccttggattgcagcttgacctttatccttgtcaaatatctcttgggttttggcccatgattccagccagtcattggctctttgtatcccactttcttgattattttggttgcgttttttaattaggcgttgtgtgttgcagagacacatgatggtgcttaatcatgccaccatctccctcattgctctttgtggttttgtgagtcttgaattgacatgtgtgctcctcatttagccttcctgaaaaccctacctgctgcacctatactttcaaacatgcactgctggtcatctggaggcatttacctgaaatgttaccatggtgcctagacaggactctataaggcttaccctgaactcctaaatcctttaagtgttgaggaatgtgagaaatgtgtatgattttaagtatttgtctgaacttcataaattagggaaattacgtagtgacacggaaagccagatatacatgtgtgacttgtggattatccatgtaattgtttccttaaatcggtgcatacaaaaataagagtcagattttgaatgggcagaaacacacaaaaaacctgtattgcacctgttgttgggaag

SEQ ID NO: 139068 - DNA, 1032 bp, Homo sapiens
ctggtgtcagttctttttttttttttttttttgagacggagtctcactatgtcacccaggctggagtgcagtgatgcaatcttggctcattgcaacctccgcctcccagattcaagcaattctcctgcttcagtcacccaagtagttgtgaccacagatgtgcgccaccacacccggctaaattttgtgtttttagtagagatggggattcaccatgttggccaggctggtctcgaactcctgacctcaggcgatctgcccacctcggccttccaaagtgctgggattacaggcatgagccaccatgccaggcctggtgtcagttctttaacagttccaccacatgggatttagcaggggaaatgctgcagagtgaatgccagagactttgtccagtttcatgtatatgaccattggctctggtttcagagagacttgggtttgggtcccagaatttcttaattgtgtgacctgggcaagtcatgtagcccccacagagccacagtgtctttatctataaaatgaggatgctggtagagttgctgtgagattaaaggagctaattcaaacactcatcccattgcctggtgcaggaaaggtgcctactggatgatagctctcatcgttgaaactctgaagcttgggactggggtaggggacacttccactagagtacagacccaggaataactctggagacatgttgcaggaggcctgccagctttgttggagtgtgtccttcgtgctggttaatacatgggaaatggctcaggaacaatagcttgctcttgggagaatcccggaagtgacagtgtgaaaaatgatggttttccaaggtggtattccctagggctgagatttcttgtccttccttttccatgctcacaggaagaaggggaggtatttggtcaagaaagggtttccagaagaaagtggctcagagtcttgctcctccttcctcccctgtctgtaaattctttgcatttggaatgtgtgatgacccctgtctgggctttgcactcagatccctgg

SEQ ID NO: 139069 - DNA, 1746 bp, Homo sapiens
gagaccagcctggccaaaatggtgaaacccccatctctactaaaaatacaaaaattagctggacgtggtggtgggtgcctgtaatcccagctacttgggaggctgaggcaggagaatcgtttgaatctgggagatggaggttgcagtgagctgagatcgcaccactgcactccagcctgggcgacagagcaagactctgtattgaaaaaatatatatatatattatataaatataataatatattataaatatatacatatatatacatatatgtatatatatgtgtatatatatatgtgtatatatatatgtgtatatatatatgtatatatatatatatatatacatatatatatacacacacacactttggagtatatagttttaatggtggtaagtgctctaaaagaagaagcaagtgctatgagagcatatattagggacctttgacccagcttgggatttatgtttaatttgagacgtgaaaatgattaggagctaagaggggttaggctggagagagggtccaggtagagacaatatgtggatccaagaaggaagaacaaagggatcaacaaagtgatagaaataggccgggaggggtggctcacgtctgtaatcccagcactttgggaggctaaggcgagtggattgcctgaggtcaggagttcgagaccagcctgaccaacatggtgaaacctcgtctctactgaaaatacaaaaattagctgggcatggtggcaggcgcctgtaatcccagctacttgggaggctgaggtaggagagtcacttgaaaccgggagccggaggttgcagtgagctgagacagggccttggcactccatccagcctaggtaacaagagcgaaactctgtcaaaaaaaaaaaagtaatagaaacaaagacaggaagcaaagagaaagaagataatgacaaggattaaagatgcagctttgaggatggcaaaaccgcagagaggagaactattaggatggtgcaaaggtaattgccagtttcaccactaaaagtaatgacaaagctcaaggtggtggtaggagggacagctgagtgactcctgagaaaatgtaaagtgctgaacctttgtagtttggaagacttggttaaccagaatgattcattccccaattatgccacatcttcaagattttactgtaaaagcaagcaggctggccctggcattcctaccataagctggtgcttcaacttccacatctggcagaggctctagatgtcacataaattgaacatagtcatccagctcaaagggggcttggggtcattgagtccaattttcattttatagctacaaagtactgataactaaaatttacaaagtaatgcacacgtggcagccactgttctaagtgtttactgtgtattaccccatttaaccctcagaacaacccagtgaagtagaaactattatgattcccatttacagatgagggaactgagacacagagaagttaagtgacttgcctatggggtcacacagctcattagtggtgctgtagaccttgggtataatcacttgtctgtatctctcaaaaatcatacagctggatagcagcagatccaagaatggactcggctgtctcccagtgcagtgccctttctactatggtaaccagaactcgacggtgctccctcagttggttgtaaataacataatcccatagtaattgcaaggatgagaatgaacttttcagtctccctgtccccacg

SEQ ID NO: 139070 - DNA, 1022 bp, Homo sapiens
gtcagagcccagagctccacttgccatggaaagcctattgactttaatagtgaccatctggctgggcacctctgaagatgtctcagttaaggcctatttggtgaatggacctttgcttatttgaaagctacactgctgttccaacctgatcattgcattttatgtgatgggcactggaagtccaaatgaaagtttcttagaaaacactcccattaaatttaccagtccatgtgtgattgccactttcagtgcagtcagagcacagtcattctctttttattgaaagcatatggtaggtacttagagcataccctaggccagactcagttatggtgccatcaagggcagcaagaattaaaaagaggaaaatggtatccaggtggcagtaggaattcggtaggttggatggaaaatattcatagttaacgagctttcataaggagaacagaaacaagttagatgtgatttgcagatccataggcaatcagtctctgctgagcagaggggaaacttggagaagattctcagaagtgtgcctcacccttgacccaaacctttccctgaacatgtgcaataaatattattaagctttgagaatttctttaaaataatatctgtcaatggtaagtgccacatgccaggccctatgctaccagcatcatctcatatcatcctcacatgtatcctgtgaggtggaggatactatcccaatgttacagatgagaaaactgagacttaaacattaagttgttcaaggtcatacagctaagaagtcacagagctgctttgattaaagttctgtctgaggctgggtgcggtagtgcatgcctgtaatccaagcactttgggaggccaaggtgggcggattgcttgagccctggagtttgagaccagcctgggcaacatggcaaaaccctgtccctaccaaaaaattacaaaagttagccaggcatagtggtgcacacctgtagtccaagctacttgggaggctgaggtgggagaattacctgagcctggggagc

SEQ ID NO: 139071 - DNA, 1049 bp, Homo sapiens
aggtgggtggatcacttgaggccaggagttcgagactagcctggccaacatggcgaaaccccatctctactaaaaatacaaaaattagccaggaatggtggtgggcacctgtaatcccagttactcaggaggctaaggcacgagaatcgcttgaaccagagaggtggaggctgcagtgagccgagattgtgccactgcactccagcctgggtgacaaagcaagactctgactcaaataataaaataaaataaagcacgtctgctgccttcacaccccattttctgtaccatgcatgtcaacttctatagggcccttctcttgtatgggtgtccattaggtcatatcttgcagatatggcagagctagagacctagaggtaaagcaagatactaggaaaacaagtaaaagggagctattttctgggagactaggaaaaagaagagactaggaaaagtaagtgaagaagctctaactagtagggggccaataaggggcaaacaaaggagagaagctggctgcttagctaaccaagtagagagcctcggatctggaaggaactggaccgaacatctgtaactgggcagggctggccttgggcctgtcttgacttccttgaaatgtctcttttacctggcctccttctcatggctgtcatcaagcagccctgttgatcatgttcctgaggaaggacagaatggggttggggagattaagtttattagcaaggcaatttcctctagggagaccccaaacctggcttggtaactacagtgaaaggagagcgtttgagccccttcccccttctgcttgatctcctctccttcaccaggctttcttcagacctggttccaatcattataaggcagatctaaagccactcttcctgacactgaaactttgctgagcctggaaaaatcacagaggctcagtttggtgtttttgcatgcaaaatacgagaggcagaggtgaaggtgcattcctggtgccctgcggttcccaggcagtatctgagtgcattttcacctgttatcgcttgcctttcaaatat

SEQ ID NO: 139072 - DNA, 2104 bp, Homo sapiens
gtaactcgtttcacctttcttgtgtctcaatgtcctcatttgtaaaatgggcacaatagtcccaatcacataggttgaagactaaaccaaagaccccatttcattagcttagccttatccctggcagataccatgaactcatatgtcattataattatgataatttacttaccctttcaattaggggtataagatgctacacagttttcctctaggacagggcccgcaaaccatggcctgcagcttgcctgtgagctaacaatgattttcatatttttaaaaggttgaaaaaaatcaaaagaagagtgccgtttcgtggcatagggaaattatatgaaattcaaatttcagtgtccataaataaagttttattggaacacaactgtgctcactcatttatatattgtctatggctgcttttgctctatcatagcagagttgagtggttgtgatagagattctatggcctagaaagcctaaatatttgccaccttgccgaccacttgccctaagacatttagccatgtctctggaacatcactgtgatagatagttcaggaattatttgcatattatcatcactgttattccaaaactctgactgcgtgtgtttctgtgtggagagtgatttacaaaggaagaaattatacaagtcataacaaaaagaaaaaaaaaaaattacacaggtccatgtaagacaaatgagatgaggcttttgtggcagttttagctaaggactcactttgtgccttcgagggatcagaaagaatttagaagtagtagcaatattggttaggagaatttacagattctcttgttttcttttcctctatcagtaccttctctgcaaggaggagagaatggatgttagtttctccttgtaagatgaattgaattgcttgtgttagtgtactaggactctgggttggttgtgaatgtggtataccaaggcaaagtctcatctgagcaaataccaccataacaccctgttctcccccaaaaggcaatctctgtagagaattataaaatcttagaatatcaagattggaaggagcctggagatctgagggaatgatattgatattaatatctccttgccgatgtagatacaatatcctgtttgaaggcaaaacattgtgtaataaacccagtctactcaatctattcaactaaggtggcctctagtgggtgtctgagtactggaactagatttgaatacttgtgagatattaaatttcatatgctttacaaaacgtgcagccatccgggcacacaaacaaaatgcccacttttggatgtgaaagtgggggcaggagtttttcccatttaggagctaaaagctctggagctctggtcctcagattcatcttgtgtctggcctgtggtcgcagtgagatgccttttcagtagggatgaggtatacttggggctgggagaggggggacatttggaggtctggcctcccaggggtaggtatgtgtttagccgggctatgcagatgaaccaatctgggtgtctctgtcagggaagaggctaggaaagctgctggtgagaggggtcagagactggtttgccccaagggggatgggggaggcagggaggctgtagaggagctgttgggccagatcttgttgagaaaatctctcagacccgagacttctcccctcctctcatttcctatatttgggctttcacacttaagggactggtcttaaggagagatgtactttttaacatttgatttgcccatgttgtgccccgtacttctgcgtaccaccagaagaccacaatgacaaagaccagcgaaggccaaaggtggccatgtgtgtatagaattgacactccaaggtcaccggatctgcaatctaccaaacagtcttgactcacaccctcaggtttcatatttgaacctcctttgcagggctggtcctggctcctttcaccttctagactgcctttcctttcttactgtcctctgagaggcacactgaacatctgtggacagtggcagttggtagctatatatatacatgtatatatatcagaatttcctctttgtacactgtagcagtggacttccattttgatgatattatacagggta

SEQ ID NO: 139073 - DNA, 1100 bp, Homo sapiens
gataggttcctacagttctgtaaagtatccattgcttctgaaaggccttctttccccattgtctttgacaatttagattttccaagtgctaggattttggagaaagtggagccatgagcccaggcaagtggggtagcctgataatgccctcccatgacacatggggctggggatgtaaaaacttcagagtttccatgtcaaataatctcctttgccctgtggccttcggttacaggaatcatttatattacaggcacattttgaaatatcaaaacaaattggacactttttccctattaggaagaaaggcatgttaatttaagtgtggagtgtgacatttggaaatgtaaaaagaggcttttggggagtagttgggggtttgagtggaatatctccctttttgtatatctctcttgtttttattcatcctgtgtcttattcagatagtgattttcattcacctgcctgatcttctggaacagggattttagagaaagccattttctcagcagctccacaagggcgagatttccaaatgggcaaggaaaggctgcagagacacatctagcttggaagtaaatgcaccaagccagccaaattggaattgtcttatagggatccttgtgtgctgtcacagaagagttttcaggaggctttcctttgggcactaatggccaaccactgctgctgagtttctcccagccttctggagggaatgccagccagcgcactctcagctgtgacatgaccctcctaggagctgttcaatgctagcgccgttttgctctgatgcccagcaccctctgcttttagtcactttccttagcgtcctttcgcagtgcttgcatttcagccaaaatcgtgcctcgtgacttttcttttcctagagttttcgcttctcacagtgaagaatctatcagctgtttcctgaatccttctatgtcttttaaggtgttaacattttcaattttgccacattcagcatttttggcctactctgacctgagctcgataaagagcatcagaaattgagtaaagacagaaataagtccctataagcatgagccctggcactgtccacttcctcctcctcccctacc

SEQ ID NO: 139074 - DNA, 1049 bp, Homo sapiens
cctcccaaatagctggaactacaggcatgcaccaccaggcctagctgtttaaaaaaaaaattacagagatgaggtgtcattatgttgccaaggctgatctcaaactcctgggctcaagcaatcctcccacctcggcctgtcaaagcactgggattacaggtgtgagccaccatgcccagcctaaagtgatactgatgcaggctatcccttaatattttcagaaatattattctagtatctcttaacaccaagattggaaccagcatcattgaacgttcagaaaacgaagactcagtggggaagggagcacttattcttctccttatttccagcttatgattcaggcctcttggtctcttagaggcagatgctgaaacgaacactctctgtctgcttttcagacaatctcatataatcatttacttgttacaaagaacaatggagttggattaaactgataaagtgttatttttcaatgcaggtcaggaaggcattgttggtttgttttgcattgctcattataatttctatttttgtcctggggaagctcatggtaatggaatgaagcatcgaggtggtttatgggccatgtgataggatcataaagttgaggttgttgcttggacaatacctttcttagaatagtaatccaagcaaagagaacatggacaggaaagaaaagaaacaataagaagaaacttcagttatttagccagttgtatgaggttttcattgctcagatccttagttaaaatgtgggatcagaggcctgcaggtaatgcctgagctcaggaaaggcagggaccatgatgcttttgcattcctgatacgaaccacagtgccaaccacattgtcagtactcaaaacgtatttgttgaatgaatttctgctaattcctgggatctattctcagagattctgattgagcaggataagtaaatagtttttcacagtgtggtccctgaaccatctgcatcagaatcacctacagggcttgtttaaaaaatgaatgccagggccgggcatggtagctcatgcctataatccca

SEQ ID NO: 139075 - DNA, 1114 bp, Homo sapiens
agatgcgaatcctgttcaaccacctcaatgcaagttgactgtagttgagtctctaggatggggcattcttaaaaatcagaacaaaaattggctgtgattgtgaagagtgtatggtgaattggcaagatggtgagtaacaaggtggagcagcctgagtttttaatcaccttgattacatgttccaaggtttaactttgtggcctccactgtttccctaattttacctgctgcgatcttattttacttttcattttattctctaatcaccgccaattagagccctgagtccatgctggttctgttgtctgcctctcagcctaatgggcctctttgtactgaggcacagaacccagctggcagcgagacttcctagggcccggaagcttcattactctttgttggcagtgaactctaaagttgctgtctttggagttgggttttctcaagtacagtcacttaacatttggtctcaaagttgttgtttttcagatttttttctcttttttcctaagtcaatcagatgcatgagctaattataagccagcaaatattttgagaaaacttccctccagtggagacccttgcacaaacttcagactatattcccagtaattaatatgctccttttatttcctttgaggtggaaaacagtcattgacaatcattccctacccatttggttcaaataactaattttgtacctgaagactaattacagtagtgacaccatcttttcctattaggtctctcacttgaagaactcagagcaatttataacctttgaatcttggggactagtttaatctgttcgtgggcagcatagcagtgaacattgttatcagaaatatagttaaacctctttaattgagcccctattaattcaaaaggtaataattcaaacagtgtgaagaacaaacttgaaacgtctatgacaagaagaaagtaagttggcaaaggggttatttaaactgccaagtagagcacacttttagaagtgccagttcacatgcaaagaactggtaagtacacacaaattgttccattaatagactcagaatcttaagattaaaagccctgtagtacaactgttcataactcaaaaaacatttgttga

SEQ ID NO: 139076 - DNA, 1020 bp, Homo sapiens
tctcgaactcccaacctcaagtgatccaccagctttggcctcccaaagtgctggctttacaggtatgagccatcgtgcctggcctagaggcattattctaagtgaagtaacataggagtgaaaaaccaaaattcatttgttctgacttataagtggaagctaagctgtgagtctacaaaggcatgcagagtgatacagtggactttagagactcagaaggaggagggtgggagtgggccagggattaaaaaaaactacacattaggtacaacatatactactcaggtgacaggtgcactgaaatctcagaattcaccactatataattcatacatataacccaaaaccacttgtaccccaaaagctattgaaataaaaaaattaaaaaaatatgtaagttccatttcagcatgagaaatacttcttagaggagtgttcataacataggttagtccccatgagatttgtgcataaagaggactccataggcaagccattccatatcttcctcttggagacttaaaagacatgttcgttcgtatattaaaggctatacagctttcaaacttttttatcaaagtcttgcagtttgtaactttgactttaacccagtattaaccaaactagtcttcctacagagcctttatttcgtagtccatgttccatgggccttgtggcagaacacacaatgggaaatgctgctttacagtggactcttggctccccagtaatggctaaatgcctgatttggttatagttctgtcagcccctgttccttccaaacgagaatcttgtgcaggaagtaagaaagagaaactagcccaagctattttgacaacaggcctctgactgaaacaacctccctgaatggttgataaacattttccctctcttaagggaaaatcatgcacagaaacaagcacatataaataatttaccaagctgtaatatgctgtaaataacaaccctgctaaataatgaattaacccaactgctgattcataggtaaatgtctcttgt

SEQ ID NO: 139077 - DNA, 1108 bp, Homo sapiens
aggcttagagaggaaaggactttgcccagagtcacacagttttagaagtgtcagagcttgggcccacatcaggactctctccacccaatgagctatgctagtgtttgccaaaggccttctccatagaaagcaacaaattcagattaggaagtgtatttcaatcactaagtagttgttttagctttctagggttaacagttgacaaactttatcatagatgaaggtatccctgaattaagagatggatttcagtaatgattgctataaaatgagtttttggtaagtggcctctatagccttgtggatttcaataaaatcagatgtccttcaaatggaaaaaatgttgaccctgctgaatataataaaatggcactttttaatgcagtaaatcttttaaactcgcatttaagagaaaagcaatgacttttaaagttaaagtttaatggtatcccttacttggaatacgattccagttggagaataaatcatagaataaaaatacttagagtaacaacaacaacaaaatgcttagagtaaccatagaatagaggccaggccttctggcaggtattcaggctgccttccttatctgacaaactattcacaacatagagcagtcagtccctctaagtctggcctcaaaggtcccaacactttgaattcctttaccctttttcttctgactttggccatcatttcactttatggcctttgttcaaagatacactgtctgcttttctacttttgcttggaagcaaaatcattttagaaagctaaggcctgaaatagctagttgctacttaatgtttgctgcttatcattgcatttgctgggacctggtgcttgtcatgcttatgcagtacaaggagggaccaaagaggcagaagacagtccctgccatagtgaagtgtagtcattttagaggacaggactaaaaaacacgaagcaatgaacaaaccccccaaaatacaatagtgtgctgaatgatgcagtgcagatacttcttagaggtatttaggtgtagctgggctagattgtttctgtattgcatcaatagattggtccatgttgactattccacttcacaatatctcagggatggacaaga

SEQ ID NO: 139078 - DNA, 1082 bp, Homo sapiens
tcttagaaatctggtgtgtaatttatacttacagcctacctccttttaagctggctatatttcaagtgctcaagagctatatgtggctactggcgatcatattggccagcacaggcccaaagaaacttctagtggagtctttcttataaagatggagctacgtttgttcataggcaaaaccaaaaccaaaacaaaaaatgactctgtatgtttattggtcccatgctctgtgctaggcactagagtggggagacaaaagggtgcagtgcagcctctaccgtaaagcagtcacacgtgaaaagtgaaatcattttggttgtaatttataatgtgtccaagcacaaggcagtttttgtgattaattctcaagcaagtgattctggcagcttaggactgtgagtttaaaggagaaagtaatccctactatttgagatggtcatggaggacaggggacattggacaaagtataatatttgtctgagatggggaaagaggagaacaagcagttcatgtgggggagacagcttgaacacatctacagaagcattgtgacacagagagtagattagcttggctataactgagaattcacataaaggaaattgtggaaagaaagatgggattccttttggctgtattaaagagagttggactatatagagagatggctaagagacctcagttaacaacaggaatgaaaataataatcgcagctagcatgttcctgattagggtccagtccctgtatcaaattctttgcatttttttgtcactgaatattacaaatgagaaagtggaatctctagagaggtagaagtacttgtccaaggtcacacatccagaaagttggcctagcaaaattttgaatacagaaccttctgagttcagagcatttactttaaccatcaggagatatgctcctgagaacgttggaagcagtgatctctgtgtttgattaatgggacgccccccagccctattgacaaaggtgctgcccaagtgctgacgtaccacctcaacataggacagagaatttccaggccaaggattctctgcagtttgtgtcctctgaacagatacaa

SEQ ID NO: 139079 - DNA, 1026 bp, Homo sapiens
tgtttagatttagagcttttgaaactttcagaatataaattaaaaattatctttgtaatcataatgcacccctaatttacatgtcctgatcttaaatctattatttatattagcttttatcaaaacattcagataagtgatcttcaaatgattagtacttaagtactggttggagatgaacttttgcaagtgaacgtcatacaatctattatttctattggagcttaattctgaagctcagagactccctagctctcctcgcctcaccatggtaatttattattatcctttgtctcctataatgtttgcttctttggcctacctgtagcataaaccttttggttgttctgcagctatttcagttaaataactcaagccctaaaaaccacagaaagaagagaatgtgcaaagcgatcatatttatggaccaccagatccttctcagcataattgccaggctttttatactgaaaggcaagaaacagctgccttgttctactttggtgtccaactcagctgtttcagattcatcctgttgctttaagcatctgttgacaggtgggaaagctcactgtgaagagaaacattgttgccctgggtggcttctgcctaagacaggcctgacccttttgtttctcccctggaaaaggaccgaagtgttccttccagccttattaagtacagctgtcgggtacattttagtagatgagaaccatttccaaagtatctcggttctgagaactgagaggcagtgtccagaaggtagttggacaagctcgtgtgctgtagaatgtctgtaagtggctgggacttacagaggagaggcccgcacgttgctagtcctccttgtcttggacatcttgagcctcccacttgaatatcctcttaggctctcattttgtaccagaaattctggaaactggaaggctattttgttggaaccccttattttacagattagaagaccgatgccagggttagttaagtgttttgttttatgctacaaagttggttagtggaattctt

SEQ ID NO: 139080 - DNA, 1004 bp, Homo sapiens
tctcatgtatttgtgctttacagactcttccctgtgttggttgttttgtctgttttgtctttgtccctcataaagtcatggcagctagaattgaagatcgcatttcgggagtgttctgaccagcacaaatcagaatgctatcatctacaatcccctcgttctaggtaatatatttctagtaatgcccaattaactagtttctgtgatagtgcctcacactgctgactcataatgaactgttgattgctaaagcctcctccaagctgcgtttggaggtttggcatgtgaatctatttatacccacttttttatatttaaaaaaggcatcacattgatgcccaaatcaggactgttatgcacatgtatgtagatgagtaagtttccctttatgaatttaaaaaaacacacacacgtcatttaactttattattcttgttgctttgcaaaatattaaggacatcttgatgctttcagaatgaacaccaaaacccatgtaagtggtataatacttaacaatgttcacacatgaaaatacataagtggtttatttaattcatgatcaattatttgtttttgaaggaattttcagcattttttatttggacattctggaaatgaaatagtaaacatgattagttcaggtagcattgagaacttttaacggatataatacttatgaagaatttatttgcagcagaaagtggtcacttgctatttataagatgaggaagatagtgtgagccaagtaggaggtggagataacctcctgccaacagatgccaaaatgggagactgccactcggggctgcctggaatgcaactgcacctagaagcatactgtgttgtatgtgtaaacaagcaagaacatccttgtgtaaatgtgtggtggctctgctccttggagaaatagaatggtttctcaacatcattttcttataaattccttgctgttaaatcagtagccatttatccagatacttgtagtggagctagagatccccctc

SEQ ID NO: 139081 - DNA, 1027 bp, Homo sapiens
gtttttaaaagcagaaggttccttgtgtctattaaaattattttaatttattgtcatattactgtaaattggaaaggaccacaaatatattatgcttaacttccagattcaagtgtcttgcaataagttaaacacatgtaatggtttatgctctttaaaatgtttttgcacttattttattctgcccagcagggcagagattattgtctgagtttcataggtgaaggcgttgaagtacagatgcttatccaagaccctgctgtttgttagaagcagataccaggacaagaaacacagcttttcttatttcacagcacttggccatagcaactactttttgctgttttattcacattgacatgaataggttagtacctgaattctttaagacagatgaaaagtaattaagtctgagtctcctcaaacaagatatccctctgaaaagatggatgttgtaggatcatgaagatggcagtctttaaaaatctcagcaaggaacagcattgtgactagcgatagagtaaaagctgtgagaattgcacagattccaaaacgctgttaagatgatctgctggtcctttttccaaatggggaatatggtgatatggttttggggtatttgtgctttatttatttatttattttgagacagggtctcactgtcacctgagctggagtgcagtggtgtgatcaccactgcactgaaggctcactgcagccttcacctccacaggctcagataatcctcccacctcagcctcccgagtagtttcgactacctgtgcataccaccagatccagctaatttttgtattttttgtagaatcagggttttgtcatgttgcccaggctggtctcaatctcctgggctcaagtgatcctcccacagtgctgggattataggcatgagccatcgtgcctggcctatttgtgcttttgatgtacattagtccctaactggctcttgagcttctgcttcatgcctcccacagtgccaactctaggattgtaagctccccaccctgat

SEQ ID NO: 139082 - DNA, 1039 bp, Homo sapiens
aaaaacagagcttttaaaaaatggaatgactttaaggaatctgaagaaaagataaatgtactcctgtatgatttttatagtgtttgcaatccagtgatcattctcacattgtttaagtttcagtttcaaggtgcgttgtccccctttatctgtggggaatgtgttccaagacccccggcggatgcctgaaaccctatatatactatgttctttcctacacatacttacctatgataaagtttaacttataaattaggcacagtaagattaacaacgacaacaataaaatagaacaattataataatatgctgtaataaaaattatatgaatgtagtctttttctctcagaatatcttatactgtgatcacgtatttcctgactgtgagtgaccatggctcactgaaaattgaaagtgaaaccacagataagggtggggactatgatagtaaggtaagattggtattaatatattgtctgagcaaggcaactaaatgtgttccttttggaatgcatactgttacaattcaggtttaattattaaacagcattggtctaagtggatgaaggttctgttttcgacccataatttaacacatgtcaagtttaaatgtacacagtaactcaaaaaacggcctgcctttggttgttgtttccaggatactgtgagcattgcaattagcaataaggaaagcactgaccaactcccggaaccacatctagttgcctggcatggaaaggaaatgcttttattttagaaagtcacttctctgcatgagcaaggaacagcgagagtcattttaaactattgtagttgaattccaaatggcaactgaggtggtcccaagatttgggccatgccaatgtagggagtagaggattaaacacagtccaacagttttacaaatttctagttggtgggtggctgggaactgtttattattgttaatgttactgaaaaatcacttgtttcgtgttaatacatcatcccttctccagtcctccagccccagtgaattttgtgttgatatagcaatgtg

SEQ ID NO: 139083 - DNA, 1057 bp, Homo sapiens
cttgcgaggctgaggcaggaaaatcacttgaacctgtgaaatggaggttgtggtgagccgagattgcaccactgcactccagcctgggtgacacagcaagactccatgtccaaaaaaaaaaaaaaaaaaaaaaaaaaagatacacatgcctaaggacccagactggaagggaactcaaggcaaacaaaaacagttggtatgttagggtcatgggacttgtttttatttttatttacctttgtcctattttctcaataaactcaaactagaaatggaaacacagtcacagaaatgaaggatattcataaagcattgtttcctgttggaagctgccttttattctcctttgccctcagacatgtactcctcattttgatgagcagcaagtgatcagaattatccagccttcagtcaaacataatctgtagaagaaagcactgctttatgcaaggagatttactgtgtgatggttggcaaaagaaaggatgcacaaagactctgtgtgggcagatttagcagaggtactgaaagtgaaaggagaggccatctggtagaatgtgctgtggcaaattaaactgagttttatgaacatgaaataccagaagaaaatccaaatgccctggacttggaaaaagcccatctgaggcaccataaaaccaatcaactacagactgacaatatgccactcataagctcagatatgcccattactagggacagcatcattcaagccagattttgcagagctcatttgatgtggatttcccgtaggggaaaaaatcaacaaattacccaccgtgtcccccacacatgcgcagatgcctgatacagagctactgtttcaataaatatggtaaatgcataatgatctggaaggcattggtttggcttctcctgcctcacattcattagtgaactctgacacccaaaccagacaactagacttgggtatggatataaggagccatttttccctccctccctccctcctttccctgcttgcctttctcttttccctcccaattattttcattctttcctctcccctccctccatc

SEQ ID NO: 139084 - DNA, 1035 bp, Homo sapiens
actggtatctcaaaggttaatgaaatttgcctaaggtgaaggtagattaagccttccattctcacacaaattgcccatcttccaatcccctttgtaccttgacattttcaacacaaaggggttggggtgctcagaggattacacaagcaagcacatatttgtcacagcacctgattatagacctgcattttggaagagaggtatttcaggatcttctcattactgaagcctctcattgtaggaccatggtcatttttaaatctcccacattgaaatgaccagttggcaaaaaccttcaattacaaaatctcttccaaagaggctgagttttttttttttcttggatcacttcacatccttttgaataccctgaggcagtatttttatgggctaacagcaaacagagtgtcgtgtagaaccaagtgtgtcccttcactttctccaccccctgcaaagtttgtgatcttcaaagcatgctggattttaaaataaaacatctacttctagtccaagcctttggctgtagactttgggcttaagtgtgtttttccacagaggtgttacatccccatttctatcagctaaggaaaatgaattcattcaaggtctcccctgccattcatcgaggctccccaagaggagctttccagaaagatctgtgccaattgtaaacttacaagatcctcagcccataacaaaatgcccagacaccttggctctgctgacacaggctgagagagataaaggaaacagctggctgaggtcctgacttttttttcacatttttttcactttttttttcacaaaggcccgctagcctttgcagactggggactttaagattgttcactacccatccagcagggctgggcatacagataccaaagctccatctccagagacgtgaactctaaccaaggatcctcaaaccacttaaatcatgaacctgaaccttgaaatgaagcaaacattacatttaaactcccatgtttaaaatcagtttgcccttttcgctcactctttactctgggggat

SEQ ID NO: 139085 - DNA, 1634 bp, Homo sapiens
accacattttgtgtgtccattcatcagtagatggatatttgaattgtttcctcagtgtttccaattgtgaataatgttgctatgaatatttgtatacagctctttgtgtggaaatatattttcattcctcttagatctgtacctaggagtggaattgctgggttatatggtaagtgtgtgtttaatttttaagaaactgccaaagaatgttttaaagtgtcagtaccattataccttctcaatagcaatatatgagattccagtttcaccacattctcaacaatacttgttagtgtctatcttttattacagtcactctagtgaatgtacagtggttctccttttgcttttaatttaatttccctgatgtctaatgacaattgatggcatatacttattaaacattcacagatctcctttgatgaaatgcctattcaaatattttgcttataattggtttatgttctcattattgagttgtaagagctctttatatagtatagatacaagtcctttatcagttctgcccataatgaattctctcagactttgtttatctgggaatagccttattttgccttcattttcaaaggacagttttactgcatgtagaattattggttaccttttttcatctttcagcattttttttttttgagacagagtcttgctctgtcaccaaggctggagtgcagtggcctaatctcagctcactgcaacctctgttcccaggttcaagcaattctcctgcctcagcctcctgagtagctgggactacaggtgtgtgccactacgctcagctaatttttgtatttttagtagagacggggtttcatcatgttggtcaggctggtctcaaactcctgacctcaagtgatctgccctccttggcctcccaaagtgctgggattacaggcgtgagccaccatgcctggccctctcagcattttgaatgttactccactacctacagcctccattgtttcagacaaaaagagcattaattgtattgatgctctactgtacataagaggcttttttctgttgtttctttctagatttttctatcctgtcttctcttttttgtttttgtctacatcattatcttccccttccctcccctcagtctctctctttgggctttcaacattttggccattatgttcctaggtgtagaatttttgtattaatcctacttgggattctttgatctttttggttgtaggctatttattttttaatcaaatttgggaaatttttagctattatttcttcaaattcttttactccctttttgtcttctctcctagaattttcattaatcacatgatacttgatgtttcacaggtctctgaggctgtttatttttattcagtcctttttcttttcttcttcaaataagataatttctatagatttatcttccagttcacaaattctttcttctgccatcttgaatctgctgatggggctctgtgggaaaattttaatttctctttctccaattttccagttcagaatttccatttagtcttttgtaaaataatttttctgtccttactgaggattttaaaaatttgttatttttgttgtcatacttcaactctttaaacgtgggttcctttagttctgtg

SEQ ID NO: 139086 - DNA, 1079 bp, Homo sapiens
tgcatttagtcctactatatagtcttgtgttgctaattccactttagctgtggcaaatataccagtgtgtagccaccgggccatgaggtaaattgaatccgtgtggagctgacagttgaaaaacctctgtctgcctcagttcaggaaacaagagcgtgttcaactcactttgggaaacccccaggcattaaaattttggcattttcatgttttgagagaactgaggagtagccctgttttgataatcatttaaaaatattttacttaattagagcagaatttgctcaggcagaaaatcacatttatatggtagccaggctgtaacacctcatagctacccattgtctctaatcagaaatgacagcctggtgactggctccatgctgggtgaagtccagcaaactgcaggccctgtaagtgcctaatcccaaacctgggcttccagtggagttggtttttttttttttttttttttttcagtggagttcttcaatgggtctggctttgaaatacttctatcctttctagtttaggaaagcaatggcacaagaaacccatatataagtcagctacttttttgatgtgtaattcacataccatacaatttcccatttaaaggctaaaattcagtggtttttagtatatttacgaagttgtacatccaaaaccacaatcaattttagaatattataattccccagaaaagaaacccctcactctttagccttcactcctagtctccccattcctcacacctctaggcaactactaatctactttctgtttctagagatttgtgcattctgataatttcacataaatggacaaatgcagtgtgtggtcctttgtgactgtcttcttggttcaacatgttgtagcatcaagcagcaattcatttcattttattgctgaataacattccattgcatgaatgcacaatttatttattcattcattggttgatggacattcagattgttttcagtttttaactattgtgaataatgctgctatgatttgtgtacaactctttgtgcagacatttgttttcatttctcatggagtagaattgctgggtc

SEQ ID NO: 139087 - DNA, 1034 bp, Homo sapiens
attagaggcttgtatttaccgaggcaaatggacgaaaggcaaggaaccagtactagaaatataaaaccatccctgtgttggatacgccctggaacaaaggaatataaggccaggattttactttctgccctggaactgacttccctttgactctgcaagttttactttcctgctttatgtctgataggcataaaatgcctaccattcttctttctaatacaattgtaatttcatcaatgggattagtgaaggcactaacaaaatctaaattctccatagtactgatcatcagggtgttctttagtagtgacttaaagaaaatcatgctctttgaaagaatatatataagttgcctttacattgctcactgagaaaagataatggagcccaaatctaggcttcttgttcctcgcctcccttttttttcctgggtgatcatacttttcaaggttatgttctttcatattcagtgttgaccatgcaaaactggtgaacaagaattggttctgggatgatttgttccagctataaagtagaaagcattttactaaaataggatgcttagatttgtttggatctacagtttattcttaactaaaattccaggaactgttggtaacagtctagattcatggcaaccagtttttacaagaattagaaagaaacgaataaaatgttctcattataaggttcaggaccgaatttgaaggctttcaggattccagatggcaaatggtagagcgaacgtgaaaatattagaaatttatgctcaatgatcatcatcttctgtccagtgaagaatgtagtttaagcaggatgggtgcgggcgtctgatgtcctcatttatttccacctctgtagctatttaagtgatgatcattcttggtggtggttaaattatgatgcacgaaatactatctccctaaggaccttgctacaggacagaggtgattacaagaaattgttgctgctgatgtaatgtttcgtataccaagattaaaccacaagatgaagtaatgtacattttttgcctt

SEQ ID NO: 139088 - DNA, 1073 bp, Homo sapiens
tcacgggggttgttctttgttcatctttccagggttttccgtacgctgactaatgcttacagctggctctctctggagagaagtgctgggaagatcaatcaaatgaaatcttaaagggtaaatcaggttttcaaatgtgttcaggcagctttaaatcgtttcagtgagaagaagtgcttacaagggcagaaatttgcccagcgaaatgcctcccaatggcaacagaacaatcacaccttggatggctgctttgtagcctgagtgtccagttcttctgagatttccaatggccatttacaactcaagagtgagggacaaaatgaagtgcatttgacttgaaggaattcactaatgcaagatcaaagttgtaaaaactgtaccttaatatgctctatcaaagggctgtatgcagatgttaagaaagggaagctgcacaaaatatcccttttcaataatttcacattttctttagtttttcagctcctataaatctcaagaaataattaacatgaaacctatattatgtttcaggaaaaactccagagagtctttcttaggcttttggaagtcagtgatgctgttttctgtcttcttagagaagtcctaaaatggaaaaattttatcatggaaattgacccattcagagcagagagtttatgtgactttatggtacaggaaatttgaaaatcgcatctcatcttttattttctattgtcatgttaaactatggttgtgcctatgggattaagtgaatattctagccacttgcattaaatgattagccagtcttttcatagtgacagttggttgtatgtgctgctagtcctgcagcggtctagtctgctagtggttaactatggagaattggtcagaggagtccctccccctattatacacatctcattaaagactctctgccactgccaaaccagaaaaggcaacttatttcacgattcattaaagaaaacataattgggaaggtaattttgtaaagtcatcatcaaacatagtccaccacccagtaggaattatcctctcattatctctttttctagatagtcattgacattgtt

SEQ ID NO: 139089 - DNA, 1165 bp, Homo sapiens
tcaattattgtatgttgaataagcaaaattataatttttaagcaccataaattcaacctgccaaaagccaaatccaattttttgtctttcaggggatggcacaatagccagcttttcaggaacctgagtgttttccaaaccagcacttttcaaacttaactatgcacatgaatcactaagttttgtgaaaatgaagattctgattcagtaggtcaggggtggggcatgagattctgcatttttaacaatctcccaggtgaggctgatgctgttggtctgcagactacaccttaagtagtaaaggtctagaccctggtctctaccttatctccaaaatttaatccatcaccaagtcatgttgtctccatctcctttgtcccaactcatgtctgtttctgttgccaccactttagctgaagccttcatcatttcactgcagagattattgcaatagctttcatgtagtctacctgctctttattctccactccactgtctatactgcagccaagatgatatctctcaaatacacctttgggcatgtcaatccattgttaaggggctttcaatgtaggataaagtaacagaccttctgtggttagattgcctttatattgggtgggagcagaggcaggggcaaaacaatgtgaggactgaagagccaagagcttagagtactggtggaccagtagtagggaccaacccatgcagatggagctgcctacagttattgtctcctccatccatctagccagttgctggttagctagctgcgcaggcatccaacatgccaaaagtattggctcttggaccagacaagctttttcatgtcatttacgctaaaaccccaataacttgatgtctattctttcagagtctctggcagataagatgcctcactgttttttttcttttaaatcaaaatgttagctagtctgggtcccatcagtccaaaatcccttgctcatgttgcttttacgtttgaattactgagaattttagtgtacatcgatcaacaatttgttctatatcctgtacctaaaagatgttttgccatttcctttttcttccagatttttttttctgtgttttaagttggggtttggtagatggttactgtgtgcacattctcacggaggtgtaagcatcgatgatactgtacctg

SEQ ID NO: 139090 - DNA, 1026 bp, Homo sapiens
ggagcccccagccatcagtcattcattagcacacaaaacatctatcacttcagagattccaacagtttttggaggaatgaaaatcaaaatatatatttcttattataaatcacaataccacagtgattattggtatgtatgcttttaattttaggctaagcgaggattgattctattcaatttttccctcaggcttataggaacacatttaagggcatctgttgatgactcattaactgtttcaaacctaaaatgtgtcaaatgctgtgactttgcaactattgttgctcttccctttagcacgaaatactttaatgatctcaagacatttatattatcagatttttgcatatattcactaaaatttggttttattaatggtctcgatgtgtcccataaatattcctggtttccaacttgagctggatttattaggaagaggcaaaatttagcttatgtgccatacctgaaggaagttacgtatcgtagcttgtgatgctgtgggacagctaaagaacaagcctttacctggtgacagattttaactggggaatagttattgtaaaaaatattttcattttttttagactacaagatatgcgggctagcattggatgcttgaaaggaaaattacatttttgctgaaatccaggcaatgcaaaaattttatggacttctatggatatttcttgatgcttagagatttgtttttttaattgcaaatgtgaattgtctatttacaaatgctattacatatggagcgggcctgtggtgtatggcactattccttggactaatggtacccaggttccattctctgctcagctcggtggctctagacaaagcccctaaaatgctgtctgcttcagtctccttaatggtgaagtggaaatgaatacctactgtcacttaactcatggagatgctggactgataattagatcatgtaagagcactttgagctgtattgaaaaatatgttgtctcaaattaagtagagtctatggttttgtaaatataaatatat

SEQ ID NO: 139091 - DNA, 2723 bp, Homo sapiens
tctcaaactcaagcatttctttatagcaatgcaagtatggtccaatgcagtccccaaggatccataaccagtcaaggattgggggaaaccttaggaagcagcatgagtaaagggagtttcaagaggaagtgttgcttgtacttatgggctagaatgagatctgtgacctcagaatttgatagaaaccaggacacctagagcccagtaggatatgcgacatattttggactttagtctgagagcagtgagaaggcattgggactttttaagtagaggagtcatttaatttgatttgtgtttttactgaattcctctggcttctgtgtgaaggggctggagagtggcaagaacatggcagtgagttagaaggctgcagggagcagcccagggagacagggttgtggcttggcttggggaagtgattgtggggatgcagagaggtgaatggattcaggaggtttaggaggaagaacagaaagaatgctgcgagtaaaagatatagatggtagggatgagagtgaggaagcaaggaagtttctgccaaggattctgccttgagaagactggagaagctgtgataagcagggcagtgggagagagtctttgtttacatgtggaatttggggagactgtggagtcgccatgttgagatgcccacgggcagtggatctgtggatgggggggctcagtactgcagacatagactgggagggttttttgtttgttcgttttgttttgtttttgagacggagtccccctccgtcacccaagctggagtgcattggtgcgatctcagtttactgcaacctccacctcctgggttcaagtgattctcctgcctcggcctcccgagtagctgggattacaggcacacaccaccatgcccagctaatttttctatttttagtagacataggttttctccatgttggccagactggtctagaactcctggcctcaagtgatccacccgccttggcctcccaaagtgctaggattataggtgtgagctactgcgctcagccagactgggagttttgaggtgctttgtctcatttatctcacttaaaataatttcaaaatatgttaaaaggaaatgttatttgcaatgcatagacaggttttcctcgctagttgctgaggataaaatccaaacaactggacctaaacagacaggattggaagaggctgttctggaccaaatgggatgctaaaccttagaatggattgacaagagaaggccatgcagaatggtgagaaggccctacttacctcagcccagcttcaaggccctaagtgagggatacctggaatgcctctgaagactggcatttggatgcccattccttcccattgcagttgccaagcccaagagcagtggagaacaactgtaccttcttgtcatgaagtgtgtacaccggaaaaaagtaaatgcttgtattttctttttcctctctttcttttctatatacagctctccaaaaacgcagatttctctagatcacagttgttcgtggagaagtgagagtgacaattttagagtaaaaaatttaatattgtgggaattatctctaaccagtcaaattactaatgaagatatttattcttgggaatctagaatcagctatttaagctttctaggatctggagtcacacagacttgagttcacatgatggctctttcacttaccaatcatgagactttgggttaatcactgcatctacttctgaccttcagtttcctcatttgtaaaaggagaatgctacctcatgggactgttttgaggcccaaatactgtatgtaagtgagagggctttataacgtataagttgctctttaaatgttatttaatcattatttagcttctggtttcattctattaataacattttaaagtgttattagaaaaattgtaagattcttgctaatattaaaatatgttgctttatttaaaagtaactcctaattcatgcccacctaataataaagaatatcattaggtggctgtaaacaaaaaaatcaaacagttctttctttcctctatacactcacacacttctggtcatcaaaatgtgtgaatttttccgacagagaccaatactccgacactagctgggtgtcttacaattcaattcagttctgaaactaaccagcattagtgcaggccccatagattaagagctcagtcccacaagtctgccccctccccttcagacatctatctcaagtcccaggttgtcacctgtacttctggctgtaaatcaaggtttccacgaccccctccttgggtttgacaatttgctaggacagctcacagaactcaaggaacacttgcttacatttactggtttattatttaagaaaggatacaataaaggatacagatgaacagccagatgccaaggtacataaggaaaggtatgtggggagggatgcagagcctcttgtcacctccatgtgttcaccaatatggaagcattctaaaccctgtctttttggggttttgtggaggcttcattaggcaggactgattaaatcatttgtcattggtaataattcagtctctctttttatcttttgttttgagacagggtctcaccctatcacctaggctggagtgcagtggcgcgatcacagctcactgcaacgtctgcctcctgggttcaagtaatcgtcccacttccacctcctgagtagctgggaccacaggcgcacggtctca

SEQ ID NO: 139092 - DNA, 1920 bp, Homo sapiens
tggtaagtgtagacacagcctttggagggtaatataaatgagttcaggcagggcatctcttgtaatctgggaacagaggagccagtgaaataaagatgctttctttcaaaaaccaagggaggagtcctagatgaaatgaatcctgaaggctattcttattttgggggctcatcatgaagataataagaatccattttgttgctgaaataaccaaataagagtggcacattcccataggagtgaccattctcttccttttggaaggggcagctttagaaaagtgccattatgcaaagctgaaggccataaaaaagtgccattaaagagaatgcaaattagcatgggcctaccagcctggcaggcattattaatgttggaggtaaagaaattaggttgaaggtatggaagaaccataaaaaaacaaccagaggccagtgtgacattgggctgatggccacttaagctgatgcctcatggctgagactttgctaagtggaagattaactgacaaaacagcttgaaggttgacgaactatttgagctcattgccagatactctagaggcaaaaatacttatttttgtgatttttttttctgaaagtggcacagtatgttctaagagtataataggccagctccagagcattaaagcaatgttgaaatgaagcatattggtgtgaatgatgcatagtaggctatttatgaaaaattacttcaataaaaaacttcatgaacatgtaaacatgattttatgtataaacacactataagatttatgaaagataatcatactaatatgagaatatgaagctgaagcaaggtattttttaaaaattacattgttgaacaaaatggtctgaatatttctgcttttaggtaaggatctatgctttgcagctgcctccttcagtttgtttttatgacttaagcaaataaaaaaaaaagagatcattttagcattagtatagcattctacaatcttctggaagcttttatatttatcgccatatgggtgtacattaaatctgcatctccctctcgtttatatgtttatgaagttataaagatatacacatgcgcacacaaaataattaagcaagtgatgtgtgtttgacaacgattggtgacttaatgccaattagagggtgttaaaaaagaacacttgctttcttaatccaattgttcccatgctttttggtttatgcacttaaggagagaacccatttaaagtgccagaatttgcatacatgcagctttgactgagccttctatttaatccagtggtcttaaaaaattattagtgagggttttagagacctacatgtcatgagatccattaggacgagactgaaagtacactttttggctgcctcctttatgggaaggggtgtgcttttgatatggggagagctaaaggtatgtggatcagctggactgtttaatgcagccagattagctcagctcatctcagttagagcatcttgtgttgcagccaccttgcctaatgccattatgggaaagtggctcataattttccagagttcagctgaatgctaagtgaaaggctacatacagtgttcgtatgtatgaaagttagcagttgcattgacgaactcttctgttttaaaaattctggttggactggaatgggcaggattgtgatattcccctttcaatgtcatgtttgttttgctttaaatcatggtgatgtaaccattattcattgtaggaagattatggcttcagtgtccaaggactgggtgcggggtttcaggttgtgacctttggctgagaatgccttctctagagaatgtcacagaggtcagatttctatgctgactgcaaacaaacctgcgaccacaaaattcagctcttctgatttgctaggatctgactccaggatgcagtactttctggtta

SEQ ID NO: 139093 - DNA, 2063 bp, Homo sapiens
gaatggactgttacagccagtggtcagtactggtcgtgtggttcatcaggctctaagctgttgggctcagttttacttagctgaggatacatttcttcagctgtctttgagagctgtggtaccatcttagctatttcatagaagagggggagaaatctaccattacaatatctgtagaattccagtagtattaattagcatctttgcatggatgtcgaacatggtgttggagtccttacaaagctgtaagttctcaggtagtacaaaaggctattcagaattaacatcacttaataataattttagatcagtgctatggggcaattaaaatgctagagcttgtctttcatggatatcagtcatcaactgaggtagtatgtaatgacattaaaagaatagccatccgtttttttctgtcattcattaagcaagattttgtgaaactgttcattatattccagggaagagacatcattctctgtctcacagagcttatggtagaacagaacaatttagtactttagatatttaattaaaaaatggattttgtttgaaaacaatttgaaaatcaataatgtctttaaaatgtcatacatttaccagaatatacaaaaaatagacaaaagtccatctgttatgttgtagtttgggtctaatcggcaaagcagatggagtaactattatgtctctggcatggtgctagcagttgtggggagattagagccaagaagaaaccaaaaaagccaagataaccatcttcagcctcaagtccataaagattagcatgtgaagtgcaggactatgtcatgtagacaggtgctgggagaggaaatttagattttggacaggcccttttccttcccttggtctcagtgtcttatctataaaattggagatttaaatgacatgctttccagggccctttcctttctaaagtatgaggaacaggccagaaaaaggagacatccttttgagaaggcctctgggagtaggagagttgtattaagaagaaaggaggcattgtgggtgggcacggagtcctcatgaccttttgaggtccagcaacctcacctaggcaggtctggccagacccgaaaggttcatgcttggagtaataatggttagggaagtagatggggttaggctccactgtggaggacttgaatggcaatgaggaaccccagtaagtatgagaagctcttggatggaaagagtgcaaaaacaccatgaaagtaaataaaggtcggagtctaggtaaagctatctccctgatatctagtctggaatgtaggtggtaccagccaccaaaacagagaggttgagaaggggatctggttcgggctggagagtactaagaagtcatgactggttcctgttgcctagatttctagtggacaggacttataaggaggtgacaactggggctctggggcaggttagggctccatcgtacattatatgtgggaatctgtggacccagttaatctgaattcacaattggcgttgttatttaagtgatagctgcaattcacatatgggactcttagccaaggaaaaggatgtttgaataaaggaaaaaagatcaatagttatgattacataagaataagatatgcttatctgtcaaaaaaaagccaaaacgaaaaggtttcaaactggtaataatatgcacaattacaacagacacaaagttgaaatctttactgtacaaagaactctcacgagctgattagagaatcaaaggacatgaccagacaatttacaacataggacccccaactagtttgcagacatggaaaaactgttttatttcactggtactaaagaaatgcacatttaaacatagaatactttttttgcctctctaaccctgattaaaacaaacaaacaaacaaagcaaaacccaacatatatcaccaccaaacaaaaaaagtagacagtgctgacaagggcatggtaaatatcaaaattctcatacattgtcagtgggaatgtaacttgaatgatctttttggaaataaatagtgtaaacacagaatataaaaatatttatttctatgacc

SEQ ID NO: 139094 - DNA, 1053 bp, Homo sapiens
acatccctaaggctttctattcactggggataggttttgtggctagattgcagaggggtctttcattgccatgttgggaatccctgcaaagctgagcaggatgggagcgggctgaggcctggttggatgagcttcagtaggagccttcagctgcgacaggaaccacctactgactcacagccattcatccacattagggaggtatcagaggctattgtggctgcaagccaagactctgaatcctgcttccagtgctacatttgggatgcttctctgcctccgcggatggttaagtgcttgggtgatatataactgctgaatagaaacaaccgtgatcacgttgcctggagaggacaaagagagagagagagagagagcttggctggtgaaaggctcaagttgtttattaagaataatatttctttaaaaaaaatcagaaattggatttcatccatctgtctgccagtatgttgtttgcagtcactcagggtcctgctcattttagaatttctgagaccatttttgaaagtgtatccaaacattgttgctcacaagctgttaaaagtcccaaattctgcaggcttttcttaggccaaatttcctctgtttgtagccaactctagtgtgccatttgttctgtagagggaattcagaactgggcccaaagaaatagcactagcccccttcttcatcactaagtatcatgctggccagcatgcacagaatggggttgagaggtcagggtccatggctatacaagtcaaagaatctgatcatattcatgttgtaccctagacttttagcatctctaaaattttcagtttggatgagtgattgggccgggggtaccacacccattgggagaagaacagatttctacatccctgaggtgttttattcaccaggggtaggtcttgtggctagattgcagaggggcctttcattgccatattgggaatccctgcaaagctgagcaggatgggagcaggctgaggcatctggaagagtaattaattatcatctcaaatccagtagcatatcattgatgggaaa

SEQ ID NO: 139095 - DNA, 1919 bp, Homo sapiens
ctgcttgtgaagtggctcgagctcttaggcgtgaggcattattatataaattcaagctcgctcgtgatccttagtaccctgagttgcctgaaggggggaatggcactgcctgcgtgtgcagtccgggagttcgagccgccgcggcaaccggagcgaggagcgcccgtccgcaccacctgtccccgccggcattccagagtagaggccgaattggcagcgagccggcccgggtcggtcgccgcctcagttcgcgcgggccctcctaggggtgtgtctcacggattccacacccggccgctcctggacaagccccgaaaggcgtcttcttccctggcgggagccgcgtgcgccccgcttttcgcgctgctgtcccggggccgccgcaggcggatgcacgtcctcaggcgacgctgggacctgggctccctctgccgggccctgctcactcggggcctggccgccctgggccactcgctgaagcacgtgctcggtgcgatcttctccaagattttcggccccatggccaggtacgttctaggtgaaagcggggttcgcgctcccaggccagggcgcgaaggtgctgtacggggagggaaggcagccgcggggggtagagaagggcgtaaagttccagctggccattggtggcccggctagggtctccggaggggtgcggcgcgcatttgcccacgccgcggctccgtcgctactgttccgcgggcaccggcagcgcagcgtctccgatagcaagtcgggctgccggccggctcattcccccagggtaactctgagcccccggctccgagctccctcgaggccgcctaccgggtgggcaagcgggcgcgggcgccggcaaaaggagggcttcggggcatgcggggagaaacccggacagaggtgtgcgctccaaagaggataggggcagaagagcccggagagtccggcggacgaagcgggatggggatgggagcgggagccaccgagagtggagcgagacacgcgggggcccggactgggggcgtgagttgaggagtggggcgactgggcccggaggggtcccactggggctaaaccccgtggaggggctccggggagctccggagagctctggcggggggagggggcgaacggcccgcgggaaggagtcggggtgggggtgtgtgtgtgccgcagaagccacagcgctgagcctgccgggaaggaaggaagcggggaagggagccgccgccgcagccgccgccgccgtggagtactcggtgcggaggggagggggagaggggcgcagcagcggctccaggggaagggggcggtgcgggggcacgacgagcgcgggctgagctgcgggattgacgtaacgagcttgggtttcccccagcgtcgggaacatggatgagaaatccaacaagctgctgctagctttggtgatgctcttcctatttgccgtgatcgtcctccaatacgtgtgccccggcacagaatgccagctcctccgcctgcaggcgttcagctccccggtgccggacccgtaccgctcggaggatgagagctccgccaggttcgtgccccgctacaatttcacccgcggcgacctcctgcgcaaggtagacttcgacatcaagggcgatgacctgatcgtgttcctgcacatccagaagaccgggggcaccactttcggccgccacttggtgcgtaacatccagctggagcagccgtgcgagtgccgcgtgggtcagaagaaatgcacttgccaccggccgggtaagcgggaaacctggctcttctccaggttctccacgggctggagctgcgggttgcacgccgactggaccgagctcaccagctgtgtgccctccgtggtggacggcaagcgcgacgccaggctgagaccgtccaggtgagtgcgcgccggtagtcgagcg

SEQ ID NO: 139096 - DNA, 3206 bp, Homo sapiens
gaagataaaaatatcagaattccagaaagattccaaaaagtgtctgaacagactcagcagtgtgacggtatgagaatctgtgaacaagcccctcagcaggcactgcctcaaagctttccaaagccaggcacccaggggcacacaaagaacctcctaagacctacaaaattaaatctacagaagtctaacaggaattccctacttgcactgggttccaataagaatccaagaaacaaagacattttagataagataaaatctaaagccaaggaaacaaaaagaaatgatgataagggagatcatacctaccggctcattagtgttgtcagccatcttgggaagactctaaagtcaggccattatatctgtgatgcctatgactttgagaaacagatctggttcacttacgatgatatgcgggtgttaggtatccaggaggcccagatgcaggaggataggcgttgcactgggtacatcttcttttacatgcataatgagatctttgaagagatgttgaaaagagaagagaatgcccagcttaatagcaaggaggtagaggagacccttcagaaggaataagaggaacgtactcctccttgtacagatctgcctgactgtctcactcgataccacttcctccatggaaggaaaactgtgaactttatccagagatgaaaatgcaattagtctaggaccaaaggtcaaacagaaacacttaatggggagatctgcattctaatcctgacacagacacctcaatcccatagctctggctgatgagcatccttctctcctacaagactgaaattgtgtttttcatgttcttcttcattttaatatagtcagggtcttgctctgtcatcctggctagagtgcagtccttcaataataactcactgcagcctcaaactcctggcatcaagcgattctctctcagcctcctgaaaagagagggacttatcttcttgcttgagatgggactatagatgtgtgccaccaggcctagctatttttttttttttttttgctttttgcagagacagggtctcactatgctgcccaggttggacttgaactcctggcctcaagcaatcttcctgcctctttccatgttctaatacagtggtttaaaaagtatgctccttaaactagcagcaccaggagcatgggggtagtcatttgaaatgcaaaatcttgggttccactgtagacctactgattcagaaacttggggtaagggatagcaatctgatggagaccgtgatgcttgatacagtttgagaaccactactgtactacatacactaccttggttgtatatttaaattgcttattttgtaaaaggttttgattacatttttgtgtttttcatattaatgtatgccttgcctttgtgaacttattaaaagccaaactcacaaaaatcacttctgatcatactctgcaatttggtggaaaaaaatagttgctgggatcctggcaataaaaaatgaggctgataacttttgaatcctcttgggcatatatagatgaggctaaacgccaagtcaaatctccagattgatttgcttttaagaaattggcccacatttcctgtgtgtctgctagcaagctcttggcccttggtggtctgagcccaccttgccatgttagttttcttagaggggcactttcattgcctcagaggaactttgtttacctggacttcatctgcgaaaccttgaacaatcctctgcattcaacattacatgactaattccagattttttttttttttttacatctctgtaccttatagtgtggtggtcttgtttcttcaatgagtaagcaatatatgctttaaagtggacttgtagaatttgaaagtattacttgttacttatttgacacaacatcagaaactccatatgaagatgttctgcttctggggaaagatgcatggatcctagggtggtcatatttcattaaaatccaggggatttaataattttgccatcaagcatgtgccaccactattatcataaccttttcctgcctttgaggcagtgaatctgttgtactttgtgcctttgctgtgaacaaatgacttgtactaagaggttttctcacataacataggattgaattttcagtcacacctttaccaataggaatatgcccccttgtatatggggtatggcttcagtatagttgtattaatccaagagcttgttgatgctcttaagcctagggtcctttaaaataggtgagttggattttagtgatgtggggaagttattagtaggtaataccctgtaagaggaaaaccagattccaaagtttggagattgtattcagaacacagtttatctagaaggaggtcttatgagacctgaagattgctaaggtatataggagggaatatcatagattgaattgatcactcttagggaagaaggtgttacagacacaatgagtgattgttcaacttctgtagtacttcagcagctgaaggataaggctggagttgcatttagaggagagtgacagtttggtttctaaatttcagttttttggcctctagagtagtttatgttgagcccagttacatagatatcagaacaggattttggtaagaatgaaggaaagttgttttgttttgaaaggagtgtgaagatgctaataacttgatattttagtacagagtttacatcctggtcatgctgctcttcagcatgtagcacttccaaatgcagggcaaaatgaaatgtgaagaagatggtaggggtatccatgacagggaggatcatggctgcaatccattgttgccctgtgagaagaaattctgaatgcactatgaatgcttgtatagtatctacatggtatgttttcaaataaaagattaaaagttgttaagtgactcagtgactattatgtatataaatttgttctcttaatttatgggtcaagttttcaagtaatccatggaaataaaagtttgactttcagtgtgttcatttcctattgcttctgtaacatattactacagaagcttataacaacatagttttttaaatcttacagtcctggagattaagagtctaagatgattatcacttggctaaaatgaaggtgtcagcggggctgcaatcttagatgctctgaagacacaatctgtttctttgccttttccagctttctggaagctgcctgcattcctggactca

SEQ ID NO: 139097 - DNA, 1739 bp, Homo sapiens
aatattcaaaatgtagtccttaaatcctatagaggaaaccaaaatcacctgcatttaactttacaaaataataatggcttgtttattgaaggattatcctccacagatgctgaacaattgaagatattcttggacagagttcatcaaaacgaggttcagccacctgtgagacctggtaagggtgggagtgtcttttctagcacaacacagaaggaaatcaacaaaacttcattccacaaagttgatgagaaatcaagtagcaaatcttttgagatagcaaaaggaagtgggacaggtgtccttcagaggatgcctttgcttacatcaaaattgacacttacttgcggagagttatcagaaaatcagcacaagaagaggaaaagaatgctctcatctagctcagagatgaatgaggaattcttgaaagaaaataattctgtagaatacaagaaatccaaggcagattgttcgaggtgtgtaagctataatcgagagaaacaattgaagttaaaagagttagaagagaataagaaattggaatgtgaatcttcatgcatcatgaacgccactggaaatccttacctagatgacattggtcttctccaagctctcactgagaaaatggttttggtatttctgttacaacaagggtatagtgacggttacacaaagtgggataaattaaaactattttttgaattatttccagagaaaatatgccacggcctccccaatttgggaaacacctgttatatgaatgcagtgttacagtctctactttcaatcccatcgtttgctgatgatttacttaatcagagtttcccatggggtaaaattccccttaatgctcttaccatgtgcttggcacggctacttttttttaaagatacctataatatagaaatcaaggagatgttactcttgaatcttaaaaaggccatttcagcagctgcagagatattccatggcaatgcacagaacgatgctcatgagtttttagctcactgtttagatcaactgaaagataacatggaaaaactcaacacaatttggaagcctaaaagtgaatttggggaagataattttcctaaacaggtttttgctgatgatcctgacaccagtgggttttcttgccctgtcattactaattttgagttagagttgttgcactccattgcttgtaaagcttgtggtcaggttattctcaagacagaactgaataattacctctccatcaaccttccccaaagaataaaagcacatccttcatctattcagtctacttttgatcttttttttggagcagaagagcttgagtataaatgtgcaaaatgtgagcacaagacttccgttggagtgcactcattcagtaggctacctagaatccttattgttcacctcaaacgctatagcttgaatgagttttgtgcattaaagaagaatgaccaggaagtcatcatttccaaatatttaaaggtgtcttctcattgcaatgaaggcaccagaccacctcttcccttgagtgaggatggagaaattacagatttccaattattaaaagttattcgaaagatgacttctggaaacatcagtgtatcatggcctgcaacaaaggaatccaaagatatcctggctccacacattggatcagataaggagtctgaacaaaaaaaaggccagacagtctttaaaggggcaagcagaagacagcagcaaaagtaccttggaaaaaattctaa

SEQ ID NO: 139098 - DNA, 1933 bp, Homo sapiens
aggtaaaatgagagaaaagcctgttggctttcataacttttgaatgcagctgtcatctatacgttttgaatctggtgtgggggtgagaaaggaggaggaatgctgaagtttattttaggctgtatggaatagtcacatagtgctcttcaatggagtcttggagaaacaatacattttagtttaaaatactctcaaagcaagcaatcaaggcagaatgaagaacaggatttaagcttgagatgtcttagggatgtaggcagtggttagaccactcaacttgtacatcagcaagatggttcttaacctttactttccatgctcagtgggctcaaataagcctcctttcatctggaatgaaatgtagtcaggatggactgtgagaaaggaatgtctcttaactgtatttttgagggcagagagaagaaatatcaagagggtcttagattatttcatctaccaatagaaagaagataataatttttgataaatacagatgagctgggtgcaaaattttaaaataagctgcaagtggttctatggttgcaggttctctcaagttgttgaaataaaaaggaacaattaagactgccttttctgtggagagaaaattgtttaaatccttacttagcatctatagtaggacagtgaaatagaaataatccagagaacttaaatttgtgctgtgcttgaatgtttttatggccccatttctaccatgaaaaatataaccattctcttacttggatgcatatgcactttcgtatatggatggatgccatctctatttcgctgaacataggttgatagatgaaatactttataaaacaaaaatctcattaatttatgtttcaccaattttaagattttgataatttggacagggactgagcagaagtttccttcagtattattcataaagatggggtttgcttaagcaagttaatagcatagagaagattcaggaagaatatttaactactgaggaggaaacagcttccaactaattcttggatgtatactttctgatgcaaacatttgtagtgctgtctgctaacttattcagtaattcacattggctccagagttgttcagagattctgattttcaataattaagtacatctaattcttcctcactggttttgaatacagggagctagctccggttaagtgggccttatagccagagttgcctgcaggagcctcactagcctatatatctaatgggtaagaagttgttattcttaaacttttgttgaatgagcaagtacaatgtaatgatgttccccagtgccaagtgaaatataggaacatagctagatttggagggaggtagactggtttactttgagtggcccatatatgagatcctctagaaatcaaggaacaattcatctgttactgagttgagggccacatagtgccttcactttctcattcacttattgtagttgccccatggggtcattctgtgacaggaagattagcatattgtatgcatgcacttgagactctattgagtatactttcagttatgtactgaaagtcttccaagtgtttcatgatttcaattgaagttgggaaattaatcagaatggagtccagtattttggtggaaactacatgtagtgtatgagtgtagagtttgagttttgttgaagcaaagcatttctgtaatagtttaaagaatgtttcctgatttttgccatagtgtgcttgtcttgggaatcaagactctgccttcatgcagccatggaaggctctcaaaaggcattggtctcgttactgaagagctggatatctagaacctgaactagactctagtataaaaccaatactagaaataggatcattctgtgtagagaactaatgaactatttctttggtgttgtcttcacagctgaacttgcaaaacagattggaacttcaagatt

SEQ ID NO: 139099 - DNA, 1006 bp, Homo sapiens
gaggaattggcttatccaagatcactaagctaagtgtagtttaaaataaatgtgagttgaagttgttttgcttttcaaaactcttgcttgggattattggagatacccagaaatggttagaaactcatatagtcattacctggctccgtctttccacttactgcattcatgggttggcacaccacctcatgggtacttcatttttattccgtgagatttgcttaggtaacttagcgggatttctcagtatatctttgttctcttcacatgttttcatgaagttgtgaaaaaatgataattaaaacacacaccacctgtaccacactgccatatatcttgaccttaacctattcagtaagataaacacatactcgattttatataattgatgacagtctgtactcatgtcagcagaggagaactgacctagaaatgttagtttctcatagtcattgagcctaacgacccttctagaggttattaatctgcctccaggccatagctccctctaaacttttcaaaacaaatggttctcttcttaaagcatcatccatttcaccaaaatacttgaaagaaaataatttttgtctcgttttcttatttttattactctttggtaatgtacactttgggattgagaaatgcaaattcagatttgaaaggtatatacggatttgtcttcaagttcttctacctcttgaaataatgaaagcctgagtggtgtgagatataaatggaggatacagagggtaaatactccaaaagcaacacaaaccttcattaaattacaggagtcccctcttttattgtgacgattacacagtgatgtttagagtctaaatcatttaggtacagtgaatcctcacatccattgtgtccctgagagcaccggctgcaatacccaacattgagcagatactcagcaaatcataatatgcagacagcatagagtagatgctcagcaactgtctcagtgaacacgaagatcaatgtagagtgaattagt

SEQ ID NO: 139100 - DNA, 2331 bp, Homo sapiens
gaaaataaatttatcctctgatagctattaactttgtggtcgggtaatataagcagcattgcagggtatcacaggcaaagtaacagtcttagaaaaagtgaatgattggtgaattctgaggcaggaaaactcaaacgtgggaatcatcgaaataaagtgtgacttgaactgggtctttagaaattaagaaggatagaactaagacaaaagtaagggaattattagggaattccaggcagagaggaaatgctacaaaaagctaagatagcagaaaatacatggacttttaggtaacactaactgaattttacttttttaattaagacattttccgttgcatggccattgtttgtatttatcttaaaacccgaggtcaggaatattttactgcttcatgtttggatatggaccatagttaatgtccatagttgactaggtatcaacatattttggttagtaagtgaataaacaaatgaattgcaatagttagcagaaagggctgcaaaatactaggaagattccaacaggagaagaaggattaatttcaagaaaacctcatttatcattatttcagtgtaacaaatacatgctttcttatgaaacagcactctttcttaatgaattcatatttaaattttggaaaataatctttgcattctgttttcctaatcaactatgttgtattaatagcactagcataattttaaaagaatgaaaaaaatgctctgccaaatctgtccctcagaaagggttcaaacttgaatagttcatgggaacaatttgctagtctagagaattcttcccattttggtcagggcctcctatggagagatttatgtgcagtgtatgtcaagagacaaaataatggcatttctctgcaacacaatgactcggacgtttgttgagtacagaaatgcacctttaaactagagaaagaaaaagaaagtctgccctgatccaatcattttgaaaagccatgcacactgaagctgggaccaaacataataacaggatttaattgctaatgctctagaggcagtgtgtctcttgatgtgttgacctttaacccaaacttgggagggtaaaaaaaagggaggggaggatttcctttccccttctgcctgctgtccccgactccctgcatctgatcatgtctgtctctaacgcagtctacgtgcccctaacattcaactctccacttccatttccattagttacttccagctttggagccgggatgagaatgaatagaagaacagaaaggaaggtgggaggagaataggagaagaaagtctgcaagcagttgacagctgcttagaatcaggggatggaattgtagctgctgaaatgagagctggacacctactcccctgatgcttctcccctactccgtagtattttgtgatatttaggccttttcatgtgtttctgttcattgttccattccaccctttctgggtccgtacttataatcatttttttctctacaccttcagctcccattttcctcttactcggttacttatgaatggcaaaatttcaagcaagttaaattcaaggctctgcctattacacacctgaaccatggcaactagacagctaaacgtggctggagaaaaaatatgcagattggtcttgctgtaaatatatgactattagcctaagtcagcccttggtgctactcagcaaggttactagtccattcagtctcccgctcttttacaaaacttccacaacttctttctcttcaattcttttaccatgctccagtcatgctggcctgctttctgtttccaacatgccaagtccattcccacctgaggaccttttcatttactcttcctcctgcctggggcaccctacatttaggtatttgttcacttccttcaacaccctgctgcatattgtcatcacgtgttaggccttcccagaaccccctatataaggcagcacatccccatcaccactgacaaattcagttcctctaactttgggtttttgtttgtttgtttggttggttggttggttggttggttggttgggtttttttcttttgcttttttgagacagagtttcgctctgttgcccaggctagagtgcagtggcatgaactcggcgcactgcaacctccgtttcccaggttcaagtgattctcctgcctcagcctcccgagtagctggatataaacagacacaggccaccatgcctggctaatttttgtatttttagtagagacaggatttcgccatgttgaccaggctggtctcaaactcctgacctgaggtgatccatctgcctcagcctccccaaattctgggattacaggcatga

SEQ ID NO: 139101 - DNA, 1498 bp, Homo sapiens
agctattttttttttaatggagcaataatctttgtttgcaatggctttggaagttttttgttttgttttgttttttgttttttgtaacacaggcccaggcttgagtgcaatcacggctcactgccacctcggcctcctgaactgatcctcccacctcagcctcctgagtagctaggactacaggaacatgccaccacacctggctattttttttctatttttcgtagagatggagtcttgctatgttgcccaggttagtctcaaactcctgggctcaagtgattctcccatcttggcctcccaaagtgttgagattacaggcatgagccactgctcccagcaggaagcacttgatatgggacaagccccagccccgcctgtctgctatggcagcgctccttagtcaagtgtcaggacttgcaagcaaagatgtcagtgaagggttagaaataggtttaccagtaaggacaagagagcacagtatagcaggatcagggctggaagttctgctgagcaaagaacgttgtaatgggatgtcagatatgagtaaagttgagggttactctggacagaaagtccaaactaagtaagattacacaaacagtgtgagggaaaaggacctgtgtgtctgggggcttcagtagcccaggaaatcttttagcactggtagctcagttatcattggcctacagtaggcttctaaaacttcctacaatctcacctttctttttacctaatgaaattttaaagcaagtgaatccctgtacagcacagtgcttaaggtgttcccaatccagtaccttctcaaaattctcatcctttttctggtccccccttcaatttgactactttctgatagcttaaaccacctccaccagttccttctctgaatgcttaagcacttattgtctgaatcagtttattgacaccaaactaactctgcccagaaatacttcgtacctttcctggattcctgtcagcactccagatatttgagggaattaaacaaaggccttttttttttcctttcctaactcaagtctagactgtgtgttttttaaggcttcatgttgctttactgtcaaaattggttccaggtcttccctcttactttttgagtatagtgtctagccattcacatgcttagagaataaggattcctagcagtgacaggcactgatactgtacacataaatacaattaatactgtgtcctcaataggtggaagcactccttgcttgccaaaaaagtggcagtttggttttctgttgttgttgacaaacttaaataaatattgagctccttggaggaggggccaagatggctgaatagaaacagtgccagtctgcagctcccagcgagaccaatgcagaaggcaggtgatttctgcatttccaactgaggtgcccagttcatctcacagggactggttaggcagtgggtgcaacccacagagagtgagcagaagcagggtggggcattacttcacccaggaaat

SEQ ID NO: 139102 - DNA, 1044 bp, Homo sapiens
tctctctgtttctctctctctctctctctctctcgtctcacacacactttttaaatggcagcaaagaggaagaagatctggtatgcagaatcagggaccacctaagtagggagatgaatgagaatcacctttttaggggttagaggtatgatttaggttttgggaatccaatcttaaggatatctcaggacaagttttaaaaacaatggacaaattaaggcaactttacaaatctgctcaggagactgatcctttagataagacaaattggtatttttaagccattctgagggattttcattccaatacctgtggcatttaatacattttcaagttcattttccaaacaagcgtctatataaaataccctcacagctcttgctaggtgtatgttacagttctccttaactaagctgaagatgcattgaagaattgctgccctctttaccttggaaatgaaaatgctatagctccctcttgtgtcgtgtgaggccaaacaacccctgattgatccacagcagtggaatctattccattagtgtcccaatagtatctctgcaaggctttttggggatgaggacattgatagaaggataagtaccaaggaatccttgtaggaccaccccaaaacattccagggagacctctgtcatactcctgctttttgaaaaatgaacttacccactactccgtagttggatcaataccttttcctttccagaattggacctgtggtcatggatgttcccaggatgaccttgacccaacaatgattgttggaataatcaatggcaagaagtaactgttttttattattgtgtccggaattggtgggttcttggtctcactgacttcaagaatgaagccgtggacgctcgcggtgagtgttacagttcttaaaggctgcgtgtctggattttgttcctgctgatgttcggatgtgtttggagtttcttccttctggtgggtttgtggtctcgctggctcaggagcgaagctgcagaccttcacggtgagtgttacagctcataaggcggcccgtct

SEQ ID NO: 139103 - DNA, 1839 bp, Homo sapiens
aaggccgttatcacctagattctatgcaatatcaagctataaatggaaacacctggtttaaagtgtgcaaataaccttgggtgatggtgagggggacaaaagacgttagttagaataaaaggaatattagaagtcagagataagagtgctctatgtatttgaattccttctttctttggtcatttatttaagtgggctattttacaaatagtaaatgggaaatgttaaactgctttcttatttatctaaaagtatatgcacacataatctggtttattgctggtattcttgatttcttaacaaaaatttatctggtttgcctgtgctgcctgaagtagacatcattaatcaccttgtggctatagctagaggtgaaagtatttcagaggagtaaacatcatcctctcatacctggccttcatttctaactccctttgtataaggaataaaaccttagcaatgaaaaccaaatacttagcgaccacccactctagtgcattagttagaacatgtccaatattcttgagcattggtctcatttttttcatacaaagaaatttaacctttcacctaactcatttccctggtccattcagtctctgtgtatgtgtctgtgcatgtttttcaagcactcagcaaggaagtaaataactaggataagcatctataggttgagaagatcttggtttcttctagagatgtgctttgttttcacatatccagaagacacaaatggaaattgtgttttttaggaaaatacagcacaggtaatcagtggagaatctgatctgagttcagtccctagctatgaggatgtgtatttgacagtctatgtactgatattgaaagaatatgagggaattagctttgtgcccttgaacaagtaatttacccataggcttatttttctcatttgtaaatgaggagcatgaacaagttttttttgtgacccaagtttcatgattcagtgggaaatatccctggcttagtatttagaagtcattaaatgtgtaacccctccacacacatgaaaaagtacactagaaattgctgaaaacaaccgcagtagaaaatgcccagtacaactcattgtctctttcagtgagaaaattgcaagttccaaaggaaattctcatgaattctgactctcatcaggaggcactgagtaaatcaatgtattattgatcaacctgctctcatgaatcttttctctccatttgtctctttacctatatggtgagtgacatgtccagcagctcctcagagaagtaagcataggtggctcaccaaattccaagggagttgtgcttagtggagcaaaaacaagtggactttaaagaatgcaactgggccaggcgcagtggctcacgcctgtaatccaagcactttgggaggccaaggcgggcagatcatgaggtcaggagatcgagaccatcctggctaacacggtgaaaccccgtctttactaaaaatacaaaaaattagccgggcgtggtggcgggcgcctgtagtcccagctactccggaggctgaggcagaagaatggagtgaacccgggaggcggagcttgcagtgagccgagattgtgccactgcactccagcctgggcgacagagccagactctgtctcaaaaaaaaaaaaaaaatgcaactgttccactatgttgttggctttaaaatagcacctgctccagggtatgaaggttctgtcacatgtgctctcatgtgttcagtcaaaggcatgaaaaagtaaaatccacgaaggaataattatgaaaatagggatatacaaacaatcaaagccaaatccccttcaatggctccaaagtcaaaccccaa

SEQ ID NO: 139104 - DNA, 5597 bp, Homo sapiens
tagatcactgcaggaccctgattataccccttttgcttattatattctgtggattatttccacgtagagaaaacaagtctcactggaacaaaataatcatactcactcccaacccaaaagggcattacctctgttacagactgaattgtattttcctgcaaaatttatattttgaagctctaacccccaatacgactgtatttggagataaagcttttaggaggtaattaaagttaaatgaagtcataaaggtaggcttctaatctgatagaattggtggccttacaaggagagatctctttctcttcccatacgtacatacacaccaagaaaaggccacaagaagacaaatgaccacatctgcaagtcaggaagagaggcctcaccagaaacaaaaccttgctggactttttcttggactttgcagcctccagaactgtgtgaacatacgtttctgttgtttaggcaacccagtctttggtatctgttatggcaacctgagctgactatgacatcttccatctttttctctagccctggaggatcattagaggcaatagctactgagtattgcctacatgtaaaggacaaataaattccctcagtggaagcttggtgtttacatgtttaaagggcagtttggcttgtctctttgtctctttgtgttttaatagcagaatggcatttcacgtaataatttaactccatggctgactctaatctgggtctgccaatgggggtttgcattccttgcttgtgatttccatcacctgacacctaatgtaatgatttccactgcaagggccatctctgtgtctatgaagctctaatctcattggcaaccttgtgatagctgggatatcctattcaatcaggaaactagtgctgtgtataattaactacatcccttccccaaccccagcaactgttatacatcacttcccctaaaactaagtgaaagaaatatttttcccacttccttttcagtaagtgcagacagccactttaagctttttttgtcattcaaagtattcatcatgagcatgtatctgttgaaaatttcagatgcattcttttaaggatgtcattagtacctgagctccctcactagctactgtacttcaggtcagtcattgtaactggagttccagccatctgcatttaagcagcagccatctctgtgattgtcctctaggactacaatagatctttaagctgataaatagtacatgtaattttactgtcaacactgcagttcattggcagtacctaagaaccagttattctgtaagttaggctgattcaatagccttatggggtaataggatatgggactgggatcttgagggcagggtttgctatgattatttaggttgtatcgttaggcattattacaccaaataatttatccaagtggatggtcttcaattttcaagtcactcagattttgagtgactgataaattaagagaatgaggttcattttggggagtgagaagaaaaaaagtacatcagaagcttggaaagggccagaatcttaaaaccagctaagcccataatgcattccagcgaattgttaagatgctattattatgttaagaagtcctctgctttcctataaaggtctctgagagtattttctgttggccattaagcagagctaggcaaaccagacagcaaatgtgacttgaatgctcagtgctgtaaaactattatgtgaatccatttcagtttaggtatggaagatgatggtgcctcagtgctgtttgcatcattaaaactcaggagggaaaatgtaaagtgagtggaaaagaggaaggtaaaataattaattggagctgtaagaccaatgacactcccacccggtcaaaccccatctatagttaaagaattaaatgctgtctagaggactctgaatgagtcacttcttgagaatctctgaaaggctgttaaccttttgcccgtatgtaggaagcataacccctagaacatattctgactgtaaggactagaaaatagaaatcaggattaggcagacattcttagagcttatccaggagagtttagttactgaaacaacaaatatcctcattacccaaactctcctctctagcccagcacaactccttgtactttctgacttttctgttgcttcccatctctggaatgtgccctcccagcctttcacttaatgagtaaaaaggcttagcccaatgctaaggtagactggaaaaaggagactgtacttaagtaggtactttttctagtcttggttcaaacacttaaaacctctctgacctgaatttacctatctgacaaacttggttgtgaaactagggatctcttatatcccatcatcaccaagaattcttaaatccctacatttaccaacctaagagatctccctgctttgtggcccgttgccgtgcaggatttacttacgtctagaaaagaacattaacttggctcctgagttttcacattaaaaaattaatcctatactctttgcttgtctcaggtatgaatctgttttataccagcagggaatattagccctctatactttttttttccttttttttttttttttaaaaaagagtctcactctgttgcccagactggagtgcagtggtacaatctcagctcactgcaacttctgtctctcaggttcaagtgattctcctgcctcagcctcctgagtagctgggattacaggcatgcaccaccgtgcctggataatttttgtattttcaatagagacagggtttcaccgtgttgcccagactggtctcaaacttctgacctcaagtaatccacccgccttggcctcccaaagtgctgggattataggtgtgagcaaccacgccagccctctgtactttttctattcatattttaagaagacatgagctcatattatactcatggttaatatcctgctttcttaacattatacttatgtcatgggcttcttagaataaccgtatattctgaaatgagtactgtagacatggtatatgagtggggtcacttttgattgaaggtgtcagaaaaacaattcgaagtggcttttaagtaagggaatttatggcatgttactgggaaattatttggtgacacttagtttcacatatagtattttctttctttttcccagccctgctttctctggttctctgagtcttggctctttcctcacacaggaagatgccttttccatgtggcaataggagacagctaccagtcctctcacccccctccccatctacattataaggagagaccttcaaactggaagggagatctcattttccccacatggcttggatgccctgttgtcccatgatgggcaggcagcgctctgattgtctgctgactaacaaaatcaacagcagtctactatattctattcctactctgctcagcaatcttcagactctccctgaaatgcacatggcagtcccactgcttttcctgggactttttgttaaacaacttcctggctggaatcacaaacacactcattctctttccaactgaaaataaccaaaagacaatcaagttgatgttttcagtgatatctgtggaggaacttctttccagaattgtggaatcagttatgtgaatagactttaataggaataaaaatccaattttacttttttttccaccttttcggtagtcacaaacacattcactccctttcccgcattttaaagtgtttcttcaaatggttttaaagccctgtaaacattgagacccacttaaatgccatttgtgatctgaatgtcaagtccccatttccacccaagtggtgctgcctgaactctctaagtgtgtaactgattgtctactgtaatctctcttgaattcagactccactatcgtaagtcaatttttcaccttttatctctggggccacatcttggactcagtaaattccacattctcgtgactttggactacatccataaggatattaactgctattgcaccattcttcatgcttttctactgccttttactgatattgatcactcttttctacagtttgatctctattgtttgtcagtgcatcattatctgtcaaaatcccatctacgtcatactataagcaaaccttgaatgtaaaatagagacttaaacagaacatcagttaggaagccattcactgcaaggaactctagcgacttaagtaggagtttaattattttaattgtttcacataacaactgtatcttgggcggtcaaaatttctatttaaggcttcttccctatatgaatatggaattaatgattaaaactaagtacagaatcatttaggcatgtttgactttgaagtaacaaaaatttttactgcatgtaaccccaactacaggctcttaatcaaataagagtttgtttaactgtcatatcacagaaaatgtgatggtagtaaattcagtccttgtgtagtagctagctccacatcattaaggatcaatgctcttgtgatctttcattttaccttgccatcctgcacttgctagctttccaattcaactaatctaaaatgacttttcttctcaacttttagtcttaaacctcatggtattccatatccggtggtcctgggctttcaactgcaagtaacaaaacacagctacaatagcttaaataagtagggtggttattgcagtggctcaatggcatcttcaaggaacaatgttcttaaatctttttacttttcaattctggttgtatttcatcttcatatttcttgtctcatgagcctaggaaggcttccttactccagtcatcttctttatacttgtctcatggtgctttatttccttattccagctgtcatatatgtattcagccagtgaaaagggaaaaagtgaatgtcaaatggcaaaatgggtccttctaaacgtgtctgtctttatcaggccaacaaactcagtagacttctgctgttggttgacagctgtgtcatatgtcctccatatcctagaaaggggattggaaagggaaatgctgtgcatgggggtttgggtcagcaaacctctagtacctgccaaacggaattagatatcacaatagattttccagaactgtcaaggtattaagctatgcctagagtcaccttattttatagatcttagatctgtactgtcaaatatgatagctactagctacttgcaactatttaaattaaaaattaaataaaattcaggttcctactctcattagtcatattcaagcattcagtaaccacatatggcttgtggctaccatattaacagtgtggatatagtacttttctgtcactgtgaagtgttctgttgcacagtgctgtagtagataaaatagggtcagtgaaggaacatagttaatttacagttctcagagcttgctagcagcagagcagacactaagcacgtggtcttctgatgtttgatcaacattcttttaagtagataacatggcttcttaaacatttctgtcctcctgcttaatattattgcttctttttttaaaaaaaaattatacctttatagtttattctatcctctagtgaatatgattagctaaaagtatatgagcaatttgtgg

SEQ ID NO: 139105 - DNA, 2520 bp, Homo sapiens
ccctggagcttaaatatgtcagccaataataattaaataccacccaaacactcacaattttctgagaagagaaaattagctggttttaatatgactggaagataaatcagaccatcaacattcaatcattcatatgagaaatttatataactcacattaaacacatcagatcaactggaaaattagagtaattaaatgttagaggggaatgaattttgttagaagagcaacaaagaattgacatgctgagagtgctgcaaagaccacatcctaaagactctcgagaaaatgcagacatacaagactggagggtatcatgaatgaacagattccctggagttcttaggagtaaacaggaggagtccaaggtgtccagattcttaataggtggatggctagacctggaatataacagcacactggagaagaggacagaaataccataaaggttgactttactccatttatctaaattaaaagccttttgaagttaaaaaaatataaatgtcttcaaatgtacagatgggtttctgataaagatcaacagccttctctccaatgtttctctatccccttctaccctcttcatatttgttttaaattcttctggctatttctctgtctccatatactagcttgaccattatttaaatttttatcttaggagatcctctatcgtcttttgctgtaatagttcatgtgccctaccctcatctttcctcttgtctcttctgccaaaatgtatgtcactactaagttctctgttcgttgcttctgcaacttcagccactgtacttcaacttccatctcttcttgggtcaagactccatgcttacaaggacatttattttgcaattctctccttcctttcacttctgtccctttcacattctgccctctgccctttacttttacatttcatggttgtcaagagcactctttcttttttatgaccctcttattttgttggagaaaatcattaagtaaactcctaggaaacgtgtgtgtgaggcagtttctgaattgttgactttttgaaaatatatttatttagacctcacatttgattgatagaattcgaagttcaaacccataagcctatggttattttctttcctctgttttcttttttctatctttgtggatcttttattactcagatattgtgtctcctggaccagtcctctgtaatatttatatttcttatatgtgtctctttgacatttcacctttattttctgggaatacattcccaagattgtgagactcatacttcactggacacctttttttaggctgcagtgcactccccaccacctccattccctgggtctttctgggtcccattcttctctcttaagcttctcattcataattgtgactccaaccatgatgttagtagacaaagaagtttttgtttctaatccttagatttgttctctaacaaataaaagatattcgttttcctttcctctctgtcgtcctccttaatttctcatgaaaatgcaccttctccttctcttggaatgccattatgcaatgtaaggcacaattaaagacttccttataattgtcaaaatatcacgtaattgcctttcacaatgccagacttgggctttgagtagaatttatcatgtgaactgtgctacaactgatttttataccattttctctgtaattggagtaaataaaagtagtataagggtcatacattattaaatgagccattaaaaaacatctcgaataacaaatggaagaagaggacatgttacttgcgtaggagtctccctatcagaaaattatgaatttttaaatctacagtaagcactctattgatatgagttaataattagctcattcttaattagcggaacacctccaaaataaccgccttgataatccaaattgtttttgcttattatatataaagaagtaatttaatttaagcactgcatctaactttacatcttgaaatatattgcattcctcttgttccacaagttctttagaattttcctgcaatgttgtgttttgtgctgattggaatctccagataatggactcatccagccacttacttgctgcaagattcctggcacacttagctctaagcatttctcttgctgggtaattgaccaaagccttctgcctacaggcaatgggtaaatgaaaaaatttcccaccattacttaaactgtcttgggatgctgaaagcaagattgagagaagggtgaggcttctgattttagagcttcgtcttagaatttagagctagaaagcaccgcttatttttcagagtgtaatactattttatattttattttttaacatttcttcttgatattttattttctctttccaacttttaggttcaggaggtatatgtgcaggtttgttacatgggtaaattgagtgttgtggaggttttgtgtacagattacttaatcatccaggtaattagcatagtaatcaataggtagttttttgatcctcaccctccttcctccctctaccctcaag

SEQ ID NO: 139106 - DNA, 1010 bp, Homo sapiens
aagtcccttataatgttttatttactcagtcttattctaggcaatgaagggaatgcacagtccaagcatccaataaggtaggacagtgcccagaaccaggcaaacgaaataaacaaagagaaaaatgctctcactaggtaatctgaagaccaaacatttaggcaaaaaactgtgtcacattggtacaagtgtactgcagcaccaagcctgcttctatatatggcatttgatattagaataataattaattatgttgttaatccttttggactattgcatggttgttttactttattgttgggttgcttttaaagtttttttttttaattgaatctttttcaacctaatatttaatgagttgagttactgtttctggactgtaagaggtgggaggagatatatcctgtgtgaggaagctatgagtggtatttcacacaaatcctttcaaataaatcagatttaaagtgtttatgttattataggctgtactgaaaacatttcaaaagctcttagtaaacttgtccctaggctgcttatgtctgcatttattcagctttcagatgttcatttgctcatgttgggggtgtgtttgttttagtttttatccagtaccatttatttatgtattattattattattatttttgtgatggagtttcactcgtttcccagcctggagtgcagtggtgcaatctcagctcactgcaacatccgcctcctgggttcaagcaattctcctgccttaacctctccagtagctaggaccacaggggcgtgccaccatgcctggctaatttttgtatttttaatagagatggcgtttcaccatgttggccaggctggtcccgaactcctgatctcaggtgatcctcccgcctcagcctcccaaattgctgggattacaggagtgagccaccacacccggccaccatttaattttatagtcaaggtttgtataactgaggcttcaagctgtatcaggatgtccaaataggttcattaattctgga

SEQ ID NO: 139107 - DNA, 2485 bp, Homo sapiens
atgttaatgtagttcaaggctactaaacagatgcatgcacatacatgtacacatggttgtaatgttgattattttgcaagatcaggaaaggaatggctgtttgttgtgccacatacaattttctttcctgagtatgcaaatgagaccagctacttcttaatctaagcttctcagagttgtttttctgagggatctgcttatgtgtgtgcagtgtgtgtctgtatgtttgattcctcaacggagtattcaaagaactattccagtgcactctggaagtgaaaaaagcacagggtacatagaggttaagaagttacatacatgtaaagaaaggacatcacatctaatactgagaaatgaacacacaggaccatatatgttctctttcatattgaattcctgataagatgagctaggccacgttcaagggcttcccagaactcttccctaatacttagtccacagtctgatactggcaaagccagaagggctcttggggatcacttcccaatgtttcagtaaagaagtggcctttagtgggataaaggccacccagattgtgattgagctgagaccaaagtcttgcctcctgctatatgttgttggttccattccactgtgcaccttccctctctggagaactcaaaactcaaacttccaggaagttgatagttataaaggcagtacattatctctttttttcagatggaggaatggaactatagtgaaatgatttatctacagtcacaaggccagatatgggactaggtcaggaatctcggtgaccatgctctggccacacctctgtttaataactgcatcaatatttaggaagaaatgtcatgcaactaagtggtgaatgttattacttagactaactaatatgtattgcatgagacatttggtcattagaaaggctttgccatccttctggaattcaaagtcatacagggtttcttgaatgcttatttccagagctagactggggttagggttgaggtattaggggtagaaggggagagtggtgtgagcatgcatagttgaagttaataggggtttagctgtccagcagcttctaagcatataataaacgtgctttgtaagagtgaaattcataggtagaaagtagtaagcgctacctttgaggtctggacctggatctaaggctttatatcagcattcaagtgtttctataaggtataggcacaagggagtttcttaggcacttattttctgtgaagttggagaactcattgggcaaaataagaaataaatagaaccattagatgtccttggagaaaagtggtttttttttttttttttttttagtcccatgaaacagctttggacaaccgtcatctctagctccatgaactcagcaaataagcatggagttctattatattaatagagtagattgaggacatttaataactcattattttgcttatatattgaaatgagtaatgagagtgaagtacaaagccaatgttaactctgtgaatggagtactggttttctacttaataaaagctacaattagtatgaatgttgttgtacactgattgccaactgccttggagtgcatatcacccccgtttattgcaatttctttgacattattccatttgaattatttatcctagttttaaagggactctacgaaaaaatgcaataaatgcttataatactttttcagaaaactgtattccaaatcattttataaagcagtgtgaaaacagtaaaacagttatgaaccaagttggctgtctattgttctggctgattgtccaattcaggccagtctgtgttcacaggctgtcaagtgctatgaaagggtctcctcaagagggtaggaggtcagcccatgtgacctataaggtttcttccagctcttgagtatacaatttggtgaaaagctaaactggtggtagacaggatacaaaccatctgcaaatgtcatttaaagtgttttggattttttttcttagagcttataaggaccaaaattcttgccaaaaggcacagcttataccttcctgtttatgatagccattattcatttgttcacatgatttgaaataatagtgttatgttcaaatgcacagtgctatcactttaaaatgtagtaaatttttctttacatgccatttacagaatgctctgtcatacttaaccattgtgttattgaagggtgaaggcagtcaaggactttatagaggtcctatatatgtgaatgtatatatttgaaatggctgagtagagagttaaaggatacgtgatagcgtgcctgtttgtgggtaatacttttcctcatctggtgcattttcgtgtgccgtgcatgcgcatgcatacacacatgcacacagaacagggttatcatagcaggttataccatctgtaaggccaagagttctgtttgtagggctgcatttttatttgttctaaagtagtgattcttaacattttctttgatcacagatcaatt

SEQ ID NO: 139108 - DNA, 1226 bp, Homo sapiens
gggaggctgaggcaggagaatcgcttgaacctgggaggcagaggttgccatgagccgagatcgcaccactgcaccccagcctgggcgacagggtgaggttccatctcaaaaaaaaaaaaaaaaaaagaagttctgccccaggccaggcccggtggcttacgcctgtaatcccagcactttgggcagccaaggcaggaggatagcttcagcacagcagtttgagaccagcctgggcaatgtggctagaccccatctctacaaaaaattttaaaaaattagctgggggtggtgtcacgcctgtagtcccagcagcttgggaggctgaggtgggaggatcacttgagcctgggaggttaaggctgcagtaagctgtgatcacaccactgccctccagcctgggtgacagagtgacactaaataaataaataaacaaacaaactaaataaataaataagaagttgtgctcaaggcctagaagaagctgatgagagtgctgtactgtggctggatcaggcagaatcttcaggccattggagtggagtactgcataagcactctggatagccacaagtacttcaggagagcctcatactgccagatttctcaaatagaagacctgtgagctttggcttgagctcttctcccagagtcaggatagaggctctgctctccttgcatgggtccttctggtgatatagtgattgatgacggggcaaggacttcagtagaagggacagggaaagatgggaactggaagcatggtgggaagagagcaagaagaagtatttatagtacacaaaggagtatgtataaactgctgcttagagcaacttcttttttcccctaattttgacctcttcccaacagattccctgtttctgctttaacctgggctgcttgctaagtgcttgcctctcaggatccttgtggaggtaaggatatatataagtcacagaggagaattattttaaaaatatgtattattttgactcacaaaacaaaatggatgcagatgaaggttttcacagcctatatgagtgttaattagaaccaattagaggccttgtccatcaaaggtgcttatttaattcaaatatgtacacaaagaaactgggccttatcaactaaatccatagctggcaccaagccatcaggaaacccacaacccaacaagtcctgtttccttggatttttgatcaaaacgaagtcaccctacacgcctggtc

SEQ ID NO: 139109 - DNA, 1116 bp, Homo sapiens
tcaagcaatcctctcaccttagtctcacaaagttctgggattacaagtgtgagccaccatacctggccttgaaattttcacgttctataaattcttggtgtgacttcctctctccacactcatgttttcatgcttgtttatatgggtacaggagagagattaaattatagcagaaattttagggcaaggctatttgggtttatagatcttttatggagaaaaacatatttttcttaatacttcatgaaaacgtgctatacacacaaagattaatttgctcaaatttcattttctttaaaagtaacctcaaattataattttatgtgttcacaaggaaagtctagagactacaaaaagtggtatgctttttgtttaacaagtgactctccaaaagaagagaaaaaacctgatatgtggcatttgtcaatttctaaggtgtaaataattccaccatcaccaatttcaagtgttgtcacactgaatgcagattttggaagagatgtgcacttaccacctcatatgagccagctcttacacaacactgaataaattaaaaaattactggcaatcaaactgcatagaattatgaccactgctaacattttaatgttcttctaactaatctttctatgaaaaatatccatatttgttctagtgaggagtctttatattgaattttagtaagtacagtaagtcctcacttaatgtcttcaataagttccagtgaactgcaacttttgaagcaaaatgacttatgacaaaaccaaatttaccattggctgattgatataagcaagagttaggtctccatggcgtatatttctggtcatgaaaacatcaccaaacttctaaataaagactgaaaacacttttactattaaacactgaaataaaggtgagctatctatacctttaagaaaggttaacaaaaacaagatacaataattacccagctcttggtgaatcagtgagtcgtggtggtcattgtggtggtgggtttatttgtttttattattgttaccttttttttttttttttttttgaggcagagtctctctctgtcaccgacactgaagtgcagtggtgtgatctcggctcactgcaaactccgcctcc

SEQ ID NO: 139110 - DNA, 1278 bp, Homo sapiens
taactagcagtcctagaaatttctttcctcgcctgtaaaaagtcacatttgggttgtgattagttcactgaagattaggtgaagacacttgacaacgtaagaaatggaggattaaatgctaaatataaatatgcactatcctaagagtatcttttaacctttagtctcagtagatacctgtgattcctctacttttctgttagcacatattttattctggtagcatcatgtaatctgaagttcacccaaccaaggtaaaaaaaaaaaatcctcatttcttttttttagaaactaaagtgtctgttacatagcacattgacatttcaaagccttttgatttatccctgtaaatggctaaattactttaaaccatggaaggtggaaatcattgttgttatttcctgtccagtaaaaactggggccagagttatttagaaaaaaaaaaaaaaactctacctaaaaccacttaatggagctttgccaccaagttccttcatcaagtggtctgatagtgaccttagctcgtttgctagatgaaaaaaagagtgaatcctaactataactgtgacaccttctccttttgcacacacttgttctacccactgctcttcacagtcatcttgggtctcttctttggtagtttctctaagtattggcatttaaaaagtaagtcacaaggtagaggaatccaaaagggttaatctctgtttgggcagataagcccaagaggtagaaacctaggaaaggtgaaagtgaccctattcagaacttaaagtgggacctggcttcttgattcctaagaggtccagtcctttgccctttaactcaggggtttccaaactccgggccgtggactggtactgggcggtggcctgttaggaaccgggccacacagtgagaggtaagcagccgggcgagcaaacattaccacctgagctccacctcctgtcagctcagcagcggtattagattttcataggagcatgaaccctattgtaaactgcacatgcaagggatctaggttgcacactccttatgagaatctaatgtcttatgatcctgaggtggatccaattttatcccgaaaccatccctccacccccggtctgtggaaaatttgtcttccacaaaactgatccctggtaccaacaaggttggggactgctgctttaactcatctggggtctactctgtcaatggctactaattgaaagaaaaaattttgagacagggtctcactctgtcacccaggctggagtgcagtggcatgatcatggt

SEQ ID NO: 139111 - DNA, 2070 bp, Homo sapiens
ccaaccaaccattttcagaagtttctctgaataagtggaaaaggaagtgttccccagccatccaccaaaatgagttccaagttatgtaattttcctgcagtggtgctgggctgtccatccacaggcaagtctcttggcagattcatacagtcaccatctccttcagaacctgtgatggaaaagtccagtaccagtgagcctatggttctgtaatgtgaaaaagatggaattggaatcaattgtcaagatcacctagacaagttcagggtgtccttacattgtgtgaggtgactagtgtcttatgaagggcagccccctcctcctgtcccctgtgcatcattaatgatggcattgaaaccccttcctagagttctagagatagggactaccaacagtggtagtcactcttcctaagtactgctgactccatgatactgactctgtttctacaacctgttcctttcattagacaggggcatatttttctacttcttaattgtgttcctcatgtacactgtgggtgccgctgttacagagacattgacaaacttagactgttctgatttcaaataaacctgattttgactttttaacaccaaagttctgatctttatttctattttttggaaaaccagtaagagacagcagcaggagggactggactggattgtagaaaacttcaagagttaaggagtgcggagtgctgctcaggtgcctttgtttcaggtatgagaatatgggtctgaaggtaatttgaaagccagccttatatatacaaggagggaaaagataggtcctgaggaccaagtaggtgtcagggaatggtagtctgccagcctgctccacttgtgacatttatttgctagggttcctgaaggtatacgccagcaattaaagtaatatgtaggttattactccttcagatgtttactgttccatacattgttgtccatttccttgctctgcagacattgctggtatgacaaggttccagtttctgagtctgaaagacactgggctcattttcactctaaggcagtagtctggcagctcagctggtttctaacatagtattttcacactttgtgacactgttaaaaattgtcaatgaattcaggcattggaagctggggacaaagatttggggtttgcatgctaaggctccctaagccttgtgtttcctgtcttgttacacaaaagaagtacagtgggatgaatgaatttgggtaaatagatcatgacaaaaagtgctaatgttatttgggttatgttgaatgctcccatataataaatgctctctcttgtgcctgtccaggtcatagtctctgttctatatagcagccaaccacaagggttgattggtaagcattcctgcatctgtgctgttccccctagattgctatctgatatgtttgtttcaaacatgtggagatcctgtgtctgaacttgatttcaccattgctgtcaattttcaggcaaggtatacagtaactgggtcaaaattcctttctgatgaatgatagaatttcatatcaatttgggattcaagctttcagtacatgggaataccaaaccttagagtggggatcttctaaccaaagtttacacttctggagttgttgcctgctatggcatatgttctggaatgtggtctttccctgtagccatttaacagtaagccttatgatttgtacttattaataacatctgtagagtaaatgcctgaattatgtagttttcactcttggtgctttgtaaatttcctcttggattgcttttgagtcagacagacctcagtttaagcctgatttaccagtaactaactttctttcttttttttttcttgagacagagtctcactctgttacccaagctggagtgtagtgatgcaatcacagctcactgcagccttgacctcctgaactcaagtgatcctcccacctcagcctcctaactggggctacaggtatgtcactatgctcagctaattttttattttttgtagaactcctggctgttctcaaactccttggctcaagtgatcctccaacttcagccttctgagtaaat

SEQ ID NO: 139112 - DNA, 3409 bp, Homo sapiens
caagaaagattagagttcattaggaattaaagaacttccatctaattttgcttagtggaaatactagaatctagcagaagtatttgataacctcttgtataatcttcataatcttcacgcctgtaatcccagcactttgggaggcagacagataaaatcttttcgctttacgaatcatcttactggggtcattttacattccaggtacctgtttgcagtgacaggaaatggattagccaaccagggcaacaacccagaggtccaggttgacaccagcaaaccagacatactgatccttcgtcaaatcatggctcttcgagtgatgaccagcaagatgaagaatgcatacaatgggaacgacgtggacttctttgatatcagtaagcatttgtggtttgaaagtacgaattgctcttgtatgtcttctgatgagaacaagtggaatgaaatttctattccatttttttttaaactaggtgatgaaagtagtggagaaggaagtggaagtggctgtgagtatcagcagtgcccttcagagtttgactacaatgccactgaccatgctgggaagagtgccaatgagaaagccgacagtgctggtgtccgtcctggggcacaggcctacctcctcactgtcttctgcatcttgttcctggttatgcagagagagtggagataattctcaaactctgagaaaaagtgttcatcaaaaagttaaaaggcaccagttatcacttttctaccatcctagtgactttgctttttaaatgaatggacaacaatgtacagtttttactatgtggccactggtttaagaagtgctgactttgttttctcattcagttttgggaggaaaagggactgtgcattgagttggttcctgctcccccaaaccatgttaaacgtggctaacagtgtaggtacagaactatagttagttgtgcatttgtgattttatcactctattatttgtttgtatgtttttttctcatttcgtttgtgggtttttttttccaactgtgatctcgccttgtttcttacaagcaaaccagggtcccttcttggcacgtaacatgtacgtatttctgaaatattaaatagctgtacagaagcaggttttatttatcatgttatcttattaaaagaaaaagcccaaaaagcagtaaaatttccatttctccctgttattttagttgccttatctggagagacgtggaggtgattttcttttttttaaattattattaagacagaatgtgagggcacaagcaggcttctgagccacttgtcagattgtattcaaagcatcaatccaagaaggaggttatgtgtacttcatttattggtgatagttggaagagactgcagactactgctttgaatgagttgaattacataagctaagatcactataggtccatttcttgaacccacttatacataaaatgtaacccatttagaaaaagattctggatatcatcccccttgaaagatagaaagcattcaggatgtcccagttatcacatgttcacacttgggtttaggggtgtttttttttaaaaccaggcaggttagctagcccaccctgtgctagttttcatgttcacactgaccctatttgaattaatatcctttgttagagtggtcgagatttcaaacccaattatgtacagggagctgtctgagagctagccagaactggggtacagcctgggctcagggaatagctgtcaacactcgggcaaagtttttgtctgtgcatgtgtatctccatttgttttgggatcccagtttttgttttaagagagtataaggtgtctcatttgagtctttttcttacctagccccctcttatcagtaaaacaaaggacttgccatggttcacagcaatgtgctacgatccaagatatcagccaaggagcccacttaggggagaactaggtgtccagatttttgtatgtgttgtttttcttgggggatggggtggggtgggagtaggtagagctgagaatactacatcttagtggtgacctttagccacgtgggtgaagtggcaaaggccatggccatatctgttgtcccaggccaaagactaacaactgccttgggaatcccttccttgtgtccttaccaaatgatagctcataaaactctgataatgtaacaaatcactttcaaaggagttcccagaagtcttcagaaagactaaaattctgtctcttcctgctttagacagccattaagatcccaactaattttaccgaacctaaaacccacaaagaggttgtttgtgttattgttcaatcttcagttgtaagagtaattctctatttttatattgaaacataattacttgatagctcagggtctacatttcattcaactttttacaccaaattctgcagagtggtcaaaatggaatattgggggctgttgtaaacagaggcttaattttattagaagtagccagttatttattaaagcatgatgttaataaaataggcatattctggctggtgtgtataagtggttttttttttaaaacaaatcagaagacataaaattgaaaaggcactccatttatatataagggaaaatagattgtaaatagctaaggggccttgtgagaacttggaaaatgtgctgatacttagtaactacctcagttgtgaggaatttcctttttagcttagactgctattacttttacttggtagaaatgaatctggtctccaaaatatggctcagagagttatccccatagaccttgttagattgtttttaatttaaaaccttgaactctgcccagctgttttcttccagtcaaattctctaaaccaataacattttccaaattaagtattcttgaaggttcttctgaactcttactgatttgttttctttctttgcattttttcctgttactcttttattatttaaattgtctcttgcttttgaacttcaactatgaaataaacaaatcatagatttttccattcaggtctgactggataactcttggcttctaagcagctggcaagctcacccccactccccaaaaaagaagaaaggcaagttgaatattttaaaaccttaagagtttggagtatgaagtagaataaaagccttgttaggagaagacctgacttttccaaagttaacagcatgtgaagggcttgtgttttacaaagtcatttataaattatttttctttaaaacacatcacctactctgtaccttaaagattttacaactcttagatttatattttatttcaaaaatcgtaactagcacctgttattttgattaaaagacactgcgaagaattgacgtaaatttctaaagtttagttactgagtgttcaaaacctaacagttcacatgaagtaaaaattgtcatttgtgattac

SEQ ID NO: 139113 - DNA, 1050 bp, Homo sapiens
gtaatatgctacaaaaatgtaagaaactattcctacagtagtaggaacacagaagagggagcctgaggagacagggatggagagaaagagcaatagcagctatgtttcacagagtgcataatatacatgcttgatcctgactctaaaagccttaggagaagagactgcatgttatctttgtgcctacagggcatggagactggtaggcctcagatggtacttacaatgaggtgggcaaggggtctaggccactcctttggagcttgcatttcaactattatttgagtggttttgtacttctaagatataaattggagttgcatcttcctcttctaattaaagttgaaaatgaattgcatatcactctggagatactttggaaatggccagaaggcacacttgtaggtagttttgtcttgtcttacaatgatctttttttgttgttgttgtttcataattaggttactgatgtcaaggagaaactgaaacaggccaagaaattctggtcctcccttccgagcaacgtttgcaacgatgagaggatggctgcaggaaacggcaatgaggatgactgttggaatgggaaaggcaaaagcaggttagtgtctgttgaatgaatttgaagtttctcccttcctagatgcctgggtgaccttcagagagggttctctcaattgtcaaccgaggcatcaggaagcaattcacagtaggtagcaacaacatggaaggcttctaggtgttcttaggaacaggctttgcactaggagtgttgagaaggcacccagttacttacaaagagtgctgagtcaaaagtttgacagtagttatagtctcgtattagggctgttccaatagtgtcattatttttaaaatatttaatgcctgtggctctttgtccaatggcctagcctcataaataaccagttctcaaaggttccattctctgacttgatgccctgtgtccctcccttagacgctcagtaacttagagaagtacccatacttttttttgtttgcttgtttgagatggagtctcgctcttttgcccaa

SEQ ID NO: 139114 - DNA, 1044 bp, Homo sapiens
ggtttatgtttcctttcagtctttcacaaacacattagtgatctggccattccttgccactaggggaataaggagttacaaaatgcactgggttttgttgttgttgttgttgttgttatttaaacgtctgcattttagatgtttattttctgtctattcataatatttttattgggagcaggtgatttcttctcagcttacgaaggaatgtgctttctgtacgtggcagccctgatgatttgacaatgatgaacacatttaagttgtgctccacttgtttacaaaagtctccttttgctagcacatcaaaagcattttttttctctcctgtagtacaatggtatattcatgctttcagcccttacttagagttagaagcatcacttgattggcgcttaccacaatgcattctgaaacttcatttgttattactgttttaaaaattgcatttcatggaaatctatttgtggtttgtgacatcggaattgtagtttagagaaatgaccccgtgcattaaaatgttgtgtagcatttgttctaggttgaaggtgaaagcttgatgactagatttggtttcattgatatgctgatgcctatgctgctttccactagaaagcttagatagaagctcagctgggggctgcaattgtcagctgtgttctttgggtaggacacaatcttccgggaactagctcttctttcaagtaaccatccttgcactacctgaagatgatagataatgtgggtctaactcctttcttgccatgcactaagcactagagtgtaaaggggggataaacaagtttaaaagttcactgtttgtcgttaatgaagcatcctttttgtcatttggggttttcatttccaagttcttctaattttgtaaaacaggtagcaggcaaaaatactaagcctcataatcctaagaaacatatatggcaagaaaacaaagacaatgtattttattgaagcgattcagtgcttactggaaaatgccatgctactccagagtctaaagcaggataatcggtgaagatatatact

SEQ ID NO: 139115 - DNA, 1121 bp, Homo sapiens
tgcagaagaagatgtgcttctgttccagtctggcaaagacaaacactgatggttgaggctattagcaggacgtgcatggtgggcacatgaagatagtctcctccactgcatctcatggctcaccctgcatagttatttgtaaaaggattttgagataattgagcaatttatgtgtgtgtgagagagagactccaggagggaagggggtgggggaggaatgggtgtttacagggtgggagttggtgcaccttgtttgttttgggtcatctccctcctctcccctgtcccaacatgtatcttttatctaatctatgtcttcaggaggcagtccaggcttactaattgtgatcaatcacaactcattcttaagttcatggccaagccttcagtgtcaatgtgatagaagcaatttctgtctctattttagccccgccactactgtctttttttcttttcacacattaggtaaaccccacagcccagtgtacccatgccctgttgaagatgatctactgctcccactgccggggtctcgtgactgtgaagccatgttacaactactgctcaaacatcatgagaggctgtttggccaaccaaggggatctcgattttgaatggaacaatttcataggtgagcaagtggttaacatatttgtgttgctggagatagcttagcttccagtcacaaggaatgttgtaattggcagctatgaaatttgtttgtttaagtgtttgctatttagtgtttgtcagaatcctgactacgctcaactactttgagaatagtaaaaacattactgcaagtgaatgttccctcaaactaatggtggcatttctgaaggtaatagatacagtggctgccaggttttaataatgagaaaatgcctttttcttggagacagagtctctttctgtcacctaggctggagtatagcagcacaatcatagctctgtgtaacctgaaactcctgggttcaagcgatcctctcaccctcagccccccaaaagccctgggattataggcatgagccactcactgagaaagtgtctttttgatatttcccgcctgaaagtcagttgtgtttatgattataggcttgtatccatgtaaatgctggagt

SEQ ID NO: 139116 - DNA, 1014 bp, Homo sapiens
aaaatgcatgtgcagctttacgagcccaaagcactttaactttgggcctctcctcttagctttgacttcttcagaaggcatgacatcagcaagaagcaatggatctgtctggagggaagtaaatacatagaagagcttcagatgaactgcttttatcaactctgttggttcattgctctttgggcctgggagtttggaatgttgttcatcactgcctgctctacttctatgtgtctgtctgtccaggcaaagaacagggcttagttgatctagcactgactccaaccgattgattgagagaattccctgtgcaggcaggcttcagccctttcttgttcattgtccacacccatcttcatcaccctctctcgaaagaattagcagagcaatggaaactcttgtaataaatatgactctaacagcaaggatggtacatggacacaccctttctgcagatagatttggcagtgtgtcagcagttttgaatatgttcatactcattgatttagtaattccacttctggatgtgcatcccaaggaaagaaagatctgcataaacacttatgtacgatgttaataggatgttcatcacagcattatttctagtggtaggaaattggaaataagcttgcatgccccacaatgattacactattctccgtccatgtggtgtcattgtatgcagccattaaaaatgatggttctgctgggtgcagtggctcacgcctgtcatcctagcagtttgggaggccaaaatgggtggatcacttgaggtcaggagtttgagacgagcctggccaacatggtgaaacaccatctctactaaaatacaaaaattagccagatgtggtggtgcacgcctgtaatcccagctactcgggaggctgaggcaggagactcacttgaaccagagaggtggagattgcagtgatttgagattgcaccactgcactccagcctgggtgacagagcaagactctgtctcgaaaaaaaaaatgatgcttctgaagaagt

SEQ ID NO: 139117 - DNA, 1436 bp, Homo sapiens
tttagcatagaatatgagaatctctgggaatttataaaagagactttagttgacatggaatattatattgtttattgactacaccagttttcctgttggtttagccatctctctgattggaaagttcttttgctttttggagagggctttattattttattttctcaaaaagggaatgaatatttttagacttcctggaacttgttagatacacatgttgcctgggcctttgcaggagcctcacaggttgaaatgaacctaaatcaaacctttccctcttggacttcatgaatgatgatagacattgactgtcttactttttatcttgcaggtgatcatttgaagatctgtccccagggttctacctgctgctctcaagagatggaggagaagtacagcctgcaaagtaaagatgatttcaaaagtgtggtcagcgaacagtgcaatcatttgcaagctgtctttgcttcacgttacaagaagtttgatggtatgttattcaagtcatatgtaagaaccggcagttaggtctgtactgtagctttttcacagctcctctgctccctcagtgcttaagttttctcccaagatgttgtccttgttggataccagagacgagtttaccctgtagctttatggctagaatacttccggatgcactggaatctgtatggtaggcattatggaaatatggtcacaaggagacaaaaaatagattagtttaacttaaatgctttgatttattttcttgggtgaacacagaatagtgttgttgacgcaagtccctttaaaaaaaaaaagacctcataataaaaagcaggcatctgaaaactgtcttagtcaaaataaagagaatttacagatgctggacttcaaattaaatttcaaaatggatccccaaagacaactagaattcctaaaagttttgcagaacacaggcaggattaaagttcttgagtttccatgcagcagagacccaaaagtagccattttactatagtcttcattaagctgggctccatccaacctcacattagctgaagctctggcatagtctttccatgtaaaagccacgacagaacccattctaatcacctatgccagacgtggcttcttgcaggcacactttctcttaatattgaagaaatagccaatatgagccaattgaaagtgtactttgatcctatctgaacaatggtacagataacagactttaaaaaatagaatatggagtccaaaacacctcaggattcttttccctggtgctgttcactcagtttgaagatttttatgaagtagatttagttttaagaggattgatttcctttgtgcctgttttaaaggccattctaattacatagtacctttgaagcatgcttttcttgacattatgtgtggtgaagaagtacaagacaaattttctagatatgaaatgt

SEQ ID NO: 139118 - DNA, 1254 bp, Homo sapiens
ttccctgcctccagaccctattctcctgcctcagtggcacctcagggccatcatttcgaatatcacttacttctaccctggctacacacacagatgcagtaagaggccaggcccacagtctagaaggaattgttcaccatcctattataaatcattttgataatttttcttaagtgcactggcttactgaggtttacctgccactttttctgcccacagagtctcacaagctggcctgtgttctgttctctgaagatcccatgcactgtagtgcttagtgctggctgtagtggagcccaaccttttgtagtctgagaaaaccagtggtgtgctctataagtgagacagtattcagtgtgcagaaggtacttggcagaactataaatccatagacttttggaaatatctctaagatccataggctgggaatcacagaactgaaccattgaaaacatgtgtgtgccattatgtaataacatttggagctttggtcttggaacttgatattatgatctgacatgcttttacacttgaatcatctcagtgcatacctgattcatgccttcattacatacttttgacctctgaaatccatgaagctgataaggacttgggaaggctgctctcatagcatgtaaacacttggaaggctgatgaatgttctgctgtagtgttatatcctttctgtccagctcttgagggattgcttattaacatttcattatccagtcatctgccatttctgttcttactgactaaaaaatgtgccctgtaacctaacatccagtataggacgttgctccatctttttgcaaagaaaagtatgtgaaacaactgtaactatttaggaaagatgtgtaatgcagaaaatagtgcatatttgtaggttttaacaggcttatttcctcttctaccaaaaactaaagagaaatcagtctgcaggtttagatctttgaaaataaatgcattctaacttttatatctttaatagagattcctaagatgttagtgttctgaagcatctttactatcattgtttgcatccagcatcagattaaaaatcaaataatttgagtgtgatagagctgttcgttggagggtctgcttgagggtagggaggctcaagagacccagatctgaaactcagcagcctctcaaataggtagttttgacttgggggcttggcaaaatattgtcataactgcaatggaaatggaagtgagaagaggtggatttatggcatgatccacatta

SEQ ID NO: 139119 - DNA, 1039 bp, Homo sapiens
attcatatactataaaactcacctcattaaagtgtacaattcagtggtttttagtatattcatggagttgtgcaaccattacctcagtctatttagaacatttttatcacccccccaaattaactgtgtaccattagcagtcacccctcatctccctccctctctttctgccctaggcaaccattaatctgctttctgtctatggagtgatgttttgagggcccagtctacaatcacttccctgtgataagaggagtcatgtggctactcacttgctcaccttgacagtggcctgcctgatgtttgctcattttcctccattaatttgacatgtcactaattactttagtgtcaaagttggagatagtttacctctcctttcctattctagagactccagaaagggaccttggacaaccttgaagtgaattgcctttctgatctctgactttctacaaccccgtttttggcagatcatcaactaccctttgcccctgagccctggtgatgggaaaccccaagaactggaagttcccttgaggttgggattttgtaacctcagcgctgagcctgatgcctgcctgcctgccacatagacactcagtgtcactgaatgaatgaacttaagcaatactgttaagatggaattaccatacctttttgacacatctgtcactatgaactaattgagcttatttatgctctgtgtgtgtgtgtgtgtgtgtgtcttcaataacccaactgtagaatcattttaaaaatagcaagtaaagctgatctcagaataaattctaggtgcatcccatcttgtgtacgtagcagaaatggatgcatttctccctaccttctgtttcttgtgttgtatgttcgattcctatccaggagaaaacaagatgaggctttatgttttagggaagaaaatggaaggtttagagaacatgtttttatttattgttttctaaaaatgctatagaaaacagtactccaagtagctgttttgattctctttaattcctttcttcttcatctgaggatgaac

SEQ ID NO: 139120 - DNA, 1122 bp, Homo sapiens
ttacaggcacccaccaccacgcttggctaatatttgtacctttaatagagatggggttttgccgtcttagccaggctggtctcaaactcctggcctcaaatgatcctcccaccttggcctcccaaagtgctgggattacaggtgtgagccaccacgcccggcccacatcacatgtataagactccactgcttgattaggaatgggaccttggagttaggatctggcactttcgaagtttttgtaaagaaaattcaggactcctcagtctccaggtcaacgaagtccagttttcatgttattctgttattgtttgctatttaggattgctgtagtctacagagatgtaactgtttgaggtggaaaatagaacatatggtatttttgcctagagagcgagggcagtggtttttattcttggctgaccaattgtttctctttcttaagcactttctatgtgccagcattgtgatttttatgggttatctcctttaatcctcacaaaaccctgtaaaatgacccctccctcactttccatataatggaactaagacttctctaagtcacttgcacaggatcagtcagcatggatttgaacccagatctttcatttttaaacgatttcattttttttgttgaaactcacataacataaaattcaccatttcaaccaacttaaagtatcagtggcatttagtatataaacagtgtcatccaaccattaagactatctagttctagaacattttcgtgacttcaaaagtaaaattctgtacccattaagacaccacttctcattcctgcctccccccagcccctggcaaccactaatctgctttcagtctctctggatttgctcattctagacatttcatataaatggaatcatacaatatatgacttttgtgtctagtttctttcacttagcgtaatctactggcactttattcccttcatggtggctgaagaatattgcactgtatggacacaccataatttcattatccattcatcagttgatgggtgcttaggttgcttctgccttttggctatggtgaatagtgctgctgtgaatgtttgtatacagctttgtatgtgaacacctgttttcagttttcttagat

SEQ ID NO: 139121 - DNA, 1205 bp, Homo sapiens
tttatgctcttttccccatgtcccccaacctgacaacccataaaaattgccttgaagagtatatggcttgcaaatgtcactgcaagtcaccctgtttgcaatcccaagcaatactgagtccttgaactgaatgctctacaacaaatcaaaaagaatgccttcctgtgagatagaggctgtgttgtacttaaatatacttactttattcactcacagctggaaaggtgcaggacagtgataacgaggtaatcctagactcttggggacatcagttagttacctgtattaagatgcattttaatatttttgtacaaacagatgtgagttcattatgagtcctgatttagggttctctggctgtgacctgaggcctgtggaagtttcagagggcttctgcagagatcccaaaaggcagtgctttcctgctgggttagagactatgcagagagagtgtttaaacagagtccagcttgacagctagcacagatactctttctgttgtgttgggagccagtggtaggtcagaaaagggaacactggctattaagagatttgcaggaggcgtaagggaagggtttgcctgagatctgactgtcttggtagcttctcagcactcctttttacccttgaggtctttgatgacacccttgggaaatgatgcccgacctgggacctttcatggttcctgcttgtacctgtcacgctatagcccggggcctgagccttctggagccttccagaaatgcttcacagaaatgctccacatgtaccaggacaatgctcagagtctgcttttggattgggctctcactcctactcaggtaattgtgcatccttacgtaacctttcaaaccgaagactgagacatttatagcaaccctaaagttcctctcatctcctctttcctctttcaaagtttgaactttgagattctcaggggaaacaacttttttttttttaagaaatgactttaattcactgcaggttttaacaacagggtatggccactctcctgttttcatctgaaggaaatggctttgtttgacagagatccttaaaacttattaacttttgaaaaatcaatagcactattccttccaggaaaaaagaaaaagaaaaaggctgtatggctcctttttacaaaggagttaaaattgtcagaatttgttaggccttttacatttttatcttgcgcatagccattt

SEQ ID NO: 139122 - DNA, 1098 bp, Homo sapiens
ctatgttcccatttgtcttaggctagacattagttaatacgctaattcattatgaaagatgagtaggtgggtgagaggaggaaagggaggcaagttatgtgtacatcagaagagacctcattttagaaaagatcaaaaaaagcagtttgaggtgaagaagtaggctgtggagcttttttgagacagctggagttcgaccggtagcttagatcataacgagaacgctggcttgggtgtgcctctctcacttcaagcttctctgcttgaagttgcgcactgggaagaacatgctgcctcagccagtgcctggaatgttgtgcatgaacttctgaaagactggagaccctcctccccttatgtgagtgcatagtcgctgagtgtgaatttgaacccagcagttcttccttcagaaggttaaatgtcaaggcattaacattcagataagtcgtcttactcaaaatttgctttaggatgctcctgcccgaaatctaacacccatgagtgctcattatgttcagaagagtctttcaggctatcaggtccaacagcagtatgtacccacggtccgtggtgctggccacatgtatatttcatggtcacaacagagtcatcttgggtagagaccctgggtaatttccatcccatctttctacctttcccaatttgatgtccccctcttcccactccctgtactctacatatagtgaaaccagatgagctgtttccccaaaacagccgggactgtcttctcgtctcgcccgcaggcctttatacacgtgttcttcctttagcctaaattttgccctccctaattctgctgattaacagtccttctcatctcttgtagatctttgcatctgttttctcagatgcccatctggaaattgcttttgacccatagcattttgccatgaatgaatgaatggacattagaatgatgaattgttcattcatttattctgtaagcatttatcaaatatctcctgtgtgcccagctaggtgtcagttattagggatataagagagagtaagacagacgcagttccagtcttcaaggcaatattctaccttatattaaaattggcagctgggtgtggt

SEQ ID NO: 139123 - DNA, 1250 bp, Homo sapiens
atttttcttggcagtgacttcacagaaagtcctgttttttggtgccagagtaagcagtcattacattccttacaatttatagtcaaattattatctactattgtttaaattgccttaattatagaagatttccctgtgctaagattttaaaaagcaaaataagacaactttttaccaatgtactttagaaatggtccttaaacatcacctgtcaccaggatgttggaggctatggtaaggattagttctttgtgtttatggggagattttttttaaaggggagtagtgaaatgagttcactttaaactgaatttgaattaaatgcccccagctggctggttggttaatgttctgccttgttgtttacccacagtttggaactaacttttctttctgccctctcagatctgatgggcctggacacattctgggaggctcttctggtatgaggtcaatggattattaagcagtgaggcagtcttagaagatgttcgtgtattctttaggttggagagcaaatgatgaaataacaaccttccacaataagggactgcatcaattttcttgtaatctgaataaagatttaggtgactggatgggatatgtttcagcttagctaatgtttcataatctctacctttgggctctgctttcaagatatatgtaaaatttgtcatcttaccatctcagtgactactatcctggtctcacccctcattacctcttgcctggattattgcagtcgcccatatcagttcccctgctctagctctctggctctggctctccccagcctgtgttctcagcatagcaaccagtgtgatggtattctcttaaacttagatcgtatcactcctttgctcagaatgctccaatggttccccatgccagctagagtgaaaatcaaggcttatgagcacatctgccttctcctgtgccagcccacgaggtcttctcttctcaggctttatctttatccaggtcccatcccactctagccatgttggtctctctgttttccttcaagcacaccaggcacgttcaggggcctttgcacttcttattttcagtgccttgaacaccctgctgccagatagcagcatggttcactccctcacatgtttcagggctttgattacctatcaccttaatagagaagcttttcctggtctctgtataaaataggatactcccacccccccaccccctgcagacacacacatatattcatatacttcgtccttcttcct

SEQ ID NO: 139124 - DNA, 1085 bp, Homo sapiens
aaaattagaatacaacacagtggtgataagtgccatacaagcgatacagatgacgagaagggagtgcccaggcatttcaaagagagaagggatttaggactctaatactatagaatattaactgggtaaagctagttcactagtaaaaatgaaaatactaatgaagataagtttaaaaatctaaccattttcattatgcctccctccataaagacaaaggtaaagggtatgcaacaatgggcattttattactcatctatgttgaaattgtttttaagagtgaggcagtgggttagaagcattcatgaacttgccaaaggtcctcttcacaatgacattgaatgatactcagaactttgtgccctagttgcagttttggagtttttatttcttgttcccttctgtgttcatgagcaatgcacctatgatcatgtgctcacacacacatacatatgtacatgcacaaaggattccaggactcctataagctgttatgactacgtggaaaaaaagtacgtgtgtatgtgtgttggagaggtagcaatactttctaatagtgagttgattatatatgacacacagcatgtgtctttaagatttgtattccgccttccccaccgtaagtaatgtgttggattttgcaatgaatctgtgatctcctgttttgttggaatcatcaatttggctctgtgtttcacttggggagggtcgaattgagccacagggcctatcactgtagaaattgtcccaagtagtttacaggaggtatcttctggacatgttcaaaaaagaatttagttaaagttctggcttatgcagctcagtctctggttagaacatataaatataaaatgtctgattcagcataattactgttttccttttttatttgattcacgttgggttgcatgcaatttcaggattaactggagactagactgaggaatgaaaaaggaagttttttgttatgtgtacaagggaaacaacattggcgttaatctgaggcagttggaagtgagtctctctggctccccaatgacattaactgttttagcactgaggtttttttcttatttatgttttta

SEQ ID NO: 139125 - DNA, 1829 bp, Homo sapiens
taaggtgcagggcctaagaaacgtacactgggaacccacagcaccccctccccaccagcacacatacacacaagaacacaaccacatggtatagtcacctatatggcatcttacgttttgatacccataagatctggtgaaaatgcccttcaagcaaaaccttgcctgggaggagatgttgcaaagggctagcatgcaccctacaatgtggatgcagccaaaggggagtggggtgcagcctgttcgctccccactcctgcttgctgtgatctctggaaggagcacttctggctggctccttccactgcctcccctctccccacccccacccccacatatccttctttttcccatctcacagtggcctttttctcccccataaaaaagggaatcaaagctgaggctttccagtggtccagacacatgctcgagctgtgcatagtgttatactgaggctatgggtagacttgcatttcaaatccttctcttttgattgacagaactggcctatgatctggatgtggatgatgcgcctggaaacagtcagcaggcaactccgaaggacaacgagataagcacctttcacaacctcgggaacgttcattccccgctgaagcttctcaccagcatggccatctcggtggtgtgcttcttcttcctggtgcactgactgcctggtgcccagcacatgtgctgccctacagcaccctgtggtcttcctcgataaagggaaccactttcttatttttttctatttttttttttttgttatcctgtatacctcctccagccatgaagtagaggactaaccatgtgttatgttttcgaaaatcaaatggtatcttttggaggaagatacattttagtggtagcatatagattgtccttttgcaaagaaagaaaaaaaaccatcaagttgtgccaaattattctcctatgtttggctgctagaacatggttaccatgtctttctctctcactccctccctttctatcgttctctctttgcatggatttctttgaaaaaaaataaattgctcaaataaaaatgtattggccctttttttgcaaaccgtcgtctatggtgactgcgcaatgctttttttttccttctcactaaactttctatccaacatattcttatcaggccccaacaggttccttgaaacccacctccctgccttccttctgggtggaaatcaatcctgactccaagaaccaataagaaagagccactccctcgcaatccacaatcttcatttcgaaaccttgggttggagtatcttgtctatgaaaccgaagtatctcaaaagagttacctggtctggtctctctttacaacttttactttgccaaaaatgctttgcccaaataggaatcctctatgtaaatcaggtacagttacaccattcatcttctcccttctcccaaatcaagacaggtgagcccaaacagtgcaaagaaatcactccccagcttctttgctgctgtctcaggcttgctgttgcctctctccacaggggctgccacatggcatgggcagccgttgctttgggtcaggttgcagaaggtgtcatcagcaaacccatgatttatagggagcaactctcactcttggcctcaggtgagcttcttcaacattcatttattcaacgagtagattttgcatacctgttgggtttcaggtactgtaccagatgctggagacagtggaaaacaaaacagaactgagccctgctctcatggaactgaaggtctgacaccagtagtaattacaacactggcttttcatcatcaaccataggcccagtattattactcaaaatctg

SEQ ID NO: 139126 - DNA, 1615 bp, Homo sapiens
cttgtcttcctggctcccagatccccctgtgcatgcctatccatgcctgcttgatgcaccccaggtccagcaacttctcccccaaagctctgtgtgtactgcctccaatggaagttgttatgccagagtttaaaagcaaaacagaaacaatccagcatggatgtgtttatagccaggatctctcatccaagattaaaaaacagctcaagaaaaaaagagaattcagaatttggtagctgatgaatatcaccagagaaacatcccaagggaagcaactgattgacctgacttgcttatggaggccctgtcagggacagccaccttggctgctgtaagtggaagactgattacagcctgcagcaggctatgtccctcagtgggctgcaagagccttggaatcagagagaaataaaactagaaggaaacttagaggtcatccagttcaacactttgatttaccagatggggcaactgaggcccagaaaagaaggaaatgacttgtctaaggtgagataataagtcagtagctaaactaggcttggaacccagggctccagactgccaggatgcacaggatcacttgaggccaggaatttaagaccagcctcctagggactctgctaggagacgctgaataaccaaagatggagggctctctatttattgcttttctcaatacagaaaaacttttcaacacacaaaaaaatgcagaccttaatgactgacaattattttaaaaaagaattatctagtctacaacacaaaggacatgaaggcgaaatgagagtcaggggctgaatgtgtaattagtacagatgttgagtctaccctttgggcatagttaaactgattacaaatagaaacagatttttggatttagcatgaaaatctccttgctggcccaaaaggttctcactgatgatcaagatagaaacaatttatgtgcattttataatatgtacctaatacagcaaaaatacattctggaaaatcactgataaacataaagatatgaatgattgaaaagagaatggtttgtggtgattctcataatacatctggtttgtagcaaactgagaagtttctggtttgatgtagatttagccactttgtagggttttttttttgtttttgtttttttaactttgctactggctgattccccagatactattcccacaggcttcttgtttatttcaacacaagatgtctgacaagtctctccctcttagagctgtcttccacagtgttaacaatcatctttctaaaaaacacaaatcagattgtgttgtttgtttacttcaaaaccttcagtggctccctgttgctcacagaatagttttactttcctaatccaccatgatttggctcttacttgtccctccgccttacctttcatctcccaccacctcttcccccacagtgcgcgcacacacacacacacacacacacacacacacacacacacaccacaacaatgtccattctgtggctcctcctaccatggaggctacttgctgcttctgaatatgcctcatagacattctctgagcttggtgattttggtcaggctgtaccctctgcctggaataaccattcattcagcccctgccat

SEQ ID NO: 139127 - DNA, 1060 bp, Homo sapiens
ctgaggcaggagaatggcgtgaaccccagaggcggagcttgcagtgagccgagatcgcgccactgcactccagcctgggcgacagagcgagaatccatctcaaaaaaaaaagaaaatggctatcaggacaccccaaaaaaagtagccaacctaaatgcgcagagcacaatggctgagtgtgagtggttggctgaagtaaatgtgatgcttaactgtatgttggtatcatttatgccatttttgaaagctggccatgcctcaaaaaatacattctggaactaatttcctattttaaatggtgttcaatattgccttttgtcagagaaaccgttctcacttgtagatttataaggtaatacaaataaacatcaaagaaataaaaatattatgatcaaccaagatgtgagtttaaagacaaaaagaaaaattttgatctctttttatgcttctaaattctcatgatacttatgccatacacatatgtataagtttataaagctgtgcgataataaaatcacagactttcacagtaggtaggtttaagattgaaacacaggagaaccatttctcctgtgagatttttttttgagtgcttatatgagcactcttaaaatccaaccacagaatatcctgtctctgagtaataaaattgggtacactggctataacaatataaagatggccaagaaccaacatggaatggtgaatcactttaagcatttggtcatggggccaaagaccaggctcttggacctagactgtgtatctaattctacttcagtaaatcaagctagtgaaggcagtgggtctcatgctgagaaaagaaggaagcccagactcaaaggggtctaattctgctgggaggttaaagaatggatgcctttcatggaattattttgttcaacttagaatgagtcgtccacagatgtgcccatttcatctcatatttgtttatacctctgctttaaaacattctttttctgctgggcacagtggctcatgcctgtaatcccagcactttgggaggccgaggcaggcggatcacctgaggtcgggagtt

SEQ ID NO: 139128 - DNA, 1164 bp, Homo sapiens
gcatgacatttacaaggagacatattttggctaacagaaagatgaactatctctttgagctattcctcaattgaatggattgccctgagaaacaatcagcttcctgactttgaaggtatttgactagagaataaataagcatatcaggccaagtgcagtggctcacatgtgtagtcccaccactttgggaggccgaggcaggcagatcacttgaggccaggagtttgagaccagcctggctaacatggcaacatcccgtctctactaaaaatacaaaaattagccaggcatggtggcacacacctgtaaacccagctactcaggaggctgaggtgggagaattgcttgaacccaggaggtggaggttgtagtgagctgagatcgcaccacttcattccagcctgggcaaccaagtgagactgcatctcaaaaaaataaaaataataaaaaaagagagtaagaaatattggctggatggggcttaggtgtcagagagtggatagatacctacatcatgatggacttttgacttccagggtcctgaatagctctgaggggctaaatttttatgatgtaaacatgtaaatagaacaaaagagaatcaatatggtggagcaaaccaatgaggccatttttcaggctgggggaaagaaagaggagtggagaagagaatctctgtggttgtttgtctatgagcacatgtcaccaattatgattttctgcaactattttcctaagaaaacggatccttacgaatggcagagacttttccagggagcaattcttttcaacatcttctgtcattcacagcctccagatttgttttgccactacaagaatccagttctcatttctccccaattatctccaggcttgtggccgtcctgccccatgttagaaaagcaaacccaggacagagccctccccccggctacaagcagttagtgctgattgctgtattgtcaatattaaggttgtccagttcacactcatcccctgcaccactctctcccttctgattctgcccacacagaatagaccagtgcatctcaagttatctatgatgaaggacccagagtttgtttgtttgtttgtttcattcctcccaaatctgtcatggaccaatatctttgtagacaataaaactaaattaccagaaaaaga

SEQ ID NO: 139129 - DNA, 1039 bp, Homo sapiens
ttggattataacttattattttagctgtctgtagcatatattccctttttatagttactttataatctgaacacaaaataacgacgatctcaagtaaaacagcaattaggaaatattttcataagccaatgatctttatttttatttatttatttatttatttttactggatcaagtgtaatcttacacttctactcctaataagcctgcacacataggaaaggtgaaggacacctcaatggcttaagtgttcttctaaagtgtcaagtcaaaccttcataaacgtaggctggtagtcattttgcattaataaattcattaatagagtggtctggtgaaaagggtcattggaaatttatgataggccttttatcatgagtgacaactgcaaaatattaatgatttagaacaaatcatgttgcctgctgaaaagtgagtagaaagcttgtagggaaatgaaatgtcctgggtttttttgtttgtttgtttgttttttgtttttttaaatgggaaagttgttaggtcctatgcagaactcggaatacattagatacagtaatatatctatttatactaccctgttggtaacaagtccaggaataaattatggcagttttaccaaaatgtattttatagtgtgagtatcccaattccccttcctttgtgctctttggaaatgcaccattcagatctttgtcacgtaagttgtagattgcttcctgctaagtaagccacccctggaactctcaggcaagatcttgtagtgactgcctccaaactcatttcttgggatatcagcccctccaacatgtgacctcagtgcaagcgaccccacgtcatccactgggagggagatcccatctgttgggcaaatgagacaccttcttacccttagactgttgaagtttgagatctaaagggaagggcgtcacttctacagagtcaaacaaactgggtcccagttctgtgtctgccacttcccaatgttgtgaccttggacaaagtcagtcagttcctctgagccacagtttcctcactt

SEQ ID NO: 139130 - DNA, 1043 bp, Homo sapiens
tatttttagtagagacagggttttgccatgttggccaggctggtctcgaactcctgacctcgtgtgatccccgcctgcctcggcctcccaaagtgctgggattacaggcatgagcccccagtgcccggcctgcccattttatttctatagagattgacctttttttctttcatcttaaattttacccatccttcaaggtgcaattcaagtgtgatgcagtgaaaagaaaataggtcttggggtaggacaaatgtttatttaaattcttgctctacttatgagcaagcatgatctgggacaagtttcttagcctcccctctatgtctccattctgtcatccattaaatggggatcataaccccaactttataggactattaaatcgagggggaacatttataaaacatctaggcaagtatctagcatatgctaggtgttccataattgttactttctctccatgaaatctttcatagccatctcagtccatagttacctctgtcctctgaattcattactaaaatgaattctgccagtgctttcatgaaacagtctacaatggctcccaggttccataggacataaagtgaccactcagagcctggcaacctattagaagaatgttgaataaacatgaaaagtaaaaataagagaagctaatgttcattggacacttattatgctctaaacactgtgccagagcttggcatgcattgtctcatatcattttcacaataccactatgaggtaggggtcattactattctcactttacagatgagaaaatttatactggaggtgttctcactcatagtgggaattgaacaacgagaacacttggacacagggcggggaatatcacacacaggggcctgtcctggggtggggggaggggggaggggggagggatagcattaggagatatacctaatgtaaatgaccagttaacgggtgcagcacaccaacatggcacatgtatacatatgtaacaaacctgcacgttgtgcacatgtaccctagaacttaaagtataataaaaaaga

SEQ ID NO: 139131 - DNA, 1145 bp, Homo sapiens
atttggtaggaagcattttgtggttttaatttagtgactgtaaatttgattattgggggcttccatagggatcttttctggtcttggtgtcctcttagctttgccttatcatgtcttaagttcctcatcagtgaattgtatcatggagactttcaggagcttaaataccatggtatgagaagatctaatgcaatatacactctggctactgcatgatgtaagtagagtcaaggagtagaccatcacatcaaatgctatggaaaggttcagaagtctgaaactctaaagagtataagcagtttacacctacgtaaatttgaaagtgattttttacagcttctgtgtaattcattgaacatttttaatgcctcctgttaataacacactgtgcagacccacctgagaaatatgaagagctgatgcattcctggttgttttctttcagctcctgagaaccatgtctatgcccaaaggtagagttctggataaaaacctggatgaggaagggtttgaaagtggagactgcggtgatgatgaagatgagtgcattggaggctctggtgatggaatgataaaagtgaagaatcagctccgcttccttgcaggtaactgattagtgctgacccaaatgtaatctaaaaatggtgatgctcaggaattaaaaataaattgaacccgctgtctgcaattcccttacattccctgcaacacacaatctcatcaactcttcaaggaaagactatacaagctctagaaagtgaagttctcaggtagcctccttcttttcctcccaccatttccaacctttggtagattaaaagggtaacttcctgtttttcattatctaaaatgaactgacctaatcagttggctctgtttctcattggagttttccttggttcttctcatttataaaaagaaatgcataataagaaatgcaaatttgggatgaaataacctgtaccataaacccccatgacacaagtttacctatataacaaacctagacatgtacccctgaacttaaaacaaaagttaaaaacaaacaaacaaaaaaaagaaatgcaaccttggaagtcttctgaaaaccactggtgagataactttcaaaggaagagccattagctgaccttcttttcttagga

SEQ ID NO: 139132 - DNA, 1070 bp, Homo sapiens
taccaaaagcagggctcaaattcctttcctattcgaaaataccagcagttctgttcaatttcacattccttcatctactgtttggccatgccagtcaaaccacttgaggtacagaaaagagaactacactacaacaaggaagtacttaatcatttggtagctgcagaatataacttggcttgccaatggcccgcataagagtctagtggtcttctgtgaccaacatgttacaaaagctatacatgctgaattcagagagacccaatcattttagcatctttaatgctgtatttgccaaacaaagcactgttttaggatatgtcccagttttttatatttaaaagaatgacctgagcatttcttaagttaatgtttacttaaggagtgaagctaaaaattatacaagggcaccattcctttgctgctgttgcttcagcctgtaaaggtgtatgattagataggaatattgcaatgattttattcttgtttcctgagagacagcccatttcccccttaggattcagtgacctaaaatttgggaagagaaaggcttgaaaatctctgacctccaaggaaactagaagctcaaaatagagtttttcaagtcccagtctcaattatctgaaacatatttaaaaattcatattcttcaaatagtataccagaacaggaaaactgctctcaccgaaaacctatttataaaccctgatctagacctagtctttaaaggaaggaagttttgtcagaaactagaggcatctcattaatcctcagtggactagaggccttctggaagaatagtgaaccgatgtcccccagtcattgaggttgactcttcaagcccaatgcttgatgacatggctgctgtggttcatacacagatgttatttttagaggcaagaattctcatttcccaaaagtataaccacaagatgtctatttggaatgaatcacatttatgcatttggacaatagtaaatgttcagatcatgtctgtgcaacctcagttccctgaagaaatatgtaatatcctggtacactctcaccccaggacccttgccctctgtcag

SEQ ID NO: 139133 - DNA, 1057 bp, Homo sapiens
cagactagcataatctctccatcttgcaaagacatttttggttactttattgaggtataatttacatctcataaaatttacctattgtaaatgtacaatgcaaaatgttttcctgaatttatacaattgtgcaaccatcaccccaacccaatttggaacatttccatcaccccaacaagttgccccataggcctgttttccgtcacttctcattcccaccccagccccaggcaaccactaatctactttctgtccttatagatttgccttttctgaatatttcatgtaaatggaattctacaagatgtaatcttttgtgtcaggcttctttcatttagcatattgtttttcaggttaatctgtgctgtagcatgtgtctgtactttgttcttttttgttgctgagtagcattccattgtacaggtatacattttgttaagaatattcattcaccagttgatggacatttggattgttttctgatttggaatgtatgaataatgccgctgtgaacatacacatacaaatctttgtgtagatgtaatatttgcacttctttgaggtagatacctaagagtgtaatggcttggtcatataataaatatatgtttaactttttcagaaactgctaaactatttttgcaaaatggctgtaccattttacattcccattaacaatgcatgagggttctttttatccatatcctattctacatatggtattgtcattcgttgattatagactttctggtgggtgtgtagtggtatctcattgtggttttaatttgcatttccctagcaagtgatgatattaagtatcttttcataagcctattatccactggtacatattctttcatgaaatatctattcaaatagtttttaatggatattttatagtttcaatggagagaaaaaagtggaaagaatatgactatgccaggagattttttgcattctcccctcctaagtattcatcagtctttgtttatttttgtagttggctttgggagttttgtttgtactgttttgagcaagtaaagggctgacatggtcc

SEQ ID NO: 139134 - DNA, 1197 bp, Homo sapiens
gactgttctatagtgttgctatgtgctattaaatagcaatcgcatttcaccgagtggagaatgcatgtggaaatcctttgggagaagtgtgctgtagaaatgttggattgacaatgttttttttcttttgtgaaccaggaagtgtaagtgtaagaaacagatctaaacactgttcggaataattgttagtgtgtacggcagagtaagcaatgaccatatatgcaagcccaggtattccagggctcaacagggcccattagagatagggaaatgaaaacagaatgttttttaaaagtaatttaagtgagtgggcttatagttcagaataacatataaagaattttggagttttctggaaagtagacagcctctatttgaatgggcctttgcaatttatgaagtgttttttttttttttatgtacacacactgaattcccataaccatgtgagataggtataactcttatcctgatttcacagcataggaaactaaggatttgtgaggttcagggatctgcataaggtctcacttctggcaagtagaagaaacaaaatagatgggaatccaggttttctgaccttaaatcctttgtctgttcagcacaccataactagatgagtgtgttggttgtggtttgatgaatggagtgtgagtctggcatactttcttaggtatattttaaacactgaatgactagaattcctggagattctggaaagctcagttgttttttgacacctgaaggttaggaccaaaatttcaaaatgttaaactgttttttaaaatacagtttaacatttctaaaatagacttccctactttgtcacatgattgctttctactgtagatggaggtgctttaagttgtcactcttttaaactgctactggccttggctgtgtcccagagacctccaggcctcacagcataactcaaataagtgctctccttctggtccattttcactttcttgtcattttcgtgttgttggataaaagtattttgcataggtaaaagagttagtataccttagaaatgactaatttctacagagcaaggagtttactcattggataggatcctctcatagagatttattattattaaatattggctgtgggatgaaaaagagagatttcagaagagcaggaatttcattttaaaaagtgtcaacttgaacttcatggagttaatgt

SEQ ID NO: 139135 - DNA, 1050 bp, Homo sapiens
atgcaagcaaaataatttaaacaaatttcccaaaatttgacatttaaaaatgtttggagctgttctgacacagacattctgtgttctgtatttggtttatggactatgccaggctccttgattaacaggtagaggacatacccacagttcaatagatcaacacatagtatttgagttcttactctaaatgtttattgtttattcagtcactgagtgtcaggtacttgggtaggctctgggagagacacaaagatgaatcagacacagtaccaccctcaaaaagcctttggcctcatagaagagacagatacagacacaaataattacaatacaaggcagaatgtgattgagattttaagacaagtccaaacaaaatgttttgtgagcacagatgaaatgattagattcacctgcaggaattggggaagaatttatggaagaaattacatatgagatggttcctggaagataatcagaatttcaacagaggggggatcactcaaggctaagagaacagcgtggacaaagcacagaggtgtgaaactgtgtggcatatttagagaatgttgattagcgagatgtgtgcggtgaattctgggagatgaggttgggataatgaagtggaagtatacagtgggcagttataaatttgaattaggagcctgagggaaaagtctagacaacagaatttttacttaaaacaagcttgtccaacccacggcccacgggactcatgtgtcccaggacagctttgaatgcggcccaacataaatttgtaaactttcttaaaacattatgagatttctttgcgatttttttctttttttttttttttagctcatcagctattgttagtgttagtgtattttatgtgtggcccaagacaattcttcttccagtgtggcccagggaagccaaaagattgtacacccctgatttaaaagtctaaaaagtatcattccctgtgaaccacatgccttgaggaacaatattagaactcagcatctgttctttggggatccacaactaaatttgaggcaaggcattcat

SEQ ID NO: 139136 - DNA, 1050 bp, Homo sapiens
cttggaaagttcagctgagaacaggagcatctggggcttattcatggtttttcagaagtttttgaagcttttttattagctgggttgacctcagattgaggaggagatttttcaaatgttaaacagttttttcttttgcattcctaaagtcatattgtgttcagcttgttaatatctgcacagggggccttcggcagaggctgccagagcggcgtgcttttgggacatagttccctatagctggtatttccctttcttgttgaggatttgcatgtgtctctttcatccacgcatacagcagattcctccacaaataattgcatttgacatcacagttgttagagaaaatgcaggggagggggaaaagcctccctttcctccacactgagacagctggagggaggaagcaggttagacagggaaatacataaacatacctggaatgtagcagcaggtaattctgtctgtgttagtcatgataataacttgcatgttggaatatcaatagtgtagattccaagatgtctaggatttagaaaggaacaaagaaaccaccacatatcaacacctagcatctcactgatttactgtgcctaagacaggaaatattggcaaacatgtttagttagaatcaatggagtatgttccaaggtgccttccccaaatattttttacagaagaactttaggcaatttatttccagcttctagtggcaggggcaagtgcaccctgctgggaaactgaaatctggctcatgatagactggcaggagttgggggccggtgtcagattccatttgcactcccagtagaagttactggaaccctcagaaaggcacactctccaaaaaggagtgtttgttcagggcatgacagtattgagaacagcaaaaaataatctatccactaacactgtgaccagcagtaactttctatgttagaaattaaccagtactgcctaaacagaagccctcattcttaatggtctgcaaaatgttccgtggctaaaacttttggaggtaagtcagtgatttgatttttttttttccta

SEQ ID NO: 139137 - DNA, 1023 bp, Homo sapiens
ggaaaatgaagacgattttttatatgtgtgtgtgtgtgtgtgtgtgtgtgtgtgtgggtgggtgtgtgggtgtgtttaaatcaagttcttcagattttcccaagtttgaactctgccctgaagtagaggctctataaataggcaggctgcccttggagtacagcttagagattttaccacatgatccagaagtcccattttaatcttcagccccaccaggacctttcatggaaggatggtatcaagtggagagacttcagagctataaagatcagggcaagttaatctgcattccttttgcattttgctctctggttgaagatggtgagaggttcctatatttaaaacccggttgacatgatatccttattggccgatgtctcacaggaggtatttagaatgattttgagcagcatataatatgtttgtgagtgtgtgtgtatttcacatgccaacagagcagaaagaattcacagggcttgtggctactgagctttcttgagacaccatcactctcagctgttggggtgatgtcacagttacaagtgacactgcctaggcccaaattcccaaagctcttttttgcattgcagagcctagggcagacctacaccatgggctctaccttcaaagaactatggaatttgttagccacagactgggaccagtgaccacttgttgtcaggcaaaaggaaagctgccccctgctgcctgagcctttgtgcctgcctgggataccatggaaaatggggaaggaatccagactcattaatgagctaatacaaaagattaagccaagctagaggcagtttgttatagctgcatatggatgctcgaaggcagtcagagctgaaagatctccagaccagaacccagtggtgctgccgcctttgtttgccagacacaaatataggataagggtatccccatggggagcaattttcgtattgccaatttcttttttcagttatgtcattccccgagctgttgtgtgacaaattgattgatcagtaattgcaatct

SEQ ID NO: 139138 - DNA, 1028 bp, Homo sapiens
ctaatcaggccatttccccttatatgtgcgtacatgcacatgccttattgatcagaggaatggcatagacatgctgggtctagatttcagcaaggtgtttgacagagattcctatgatttgttttaaaataagtaaggagaaacattggctaactgatcatctacttggataaatgtgtagctaattaattatcatatatgaaatgtatcaatatcagcccagagtgaggcctttggttattaactttgtgcttagccccttattgcctaaagtttttgctagtgacttaactgaagatagagaaggcatacttctaatatttagtgactgcatgatgctaggtgggggttagtgaatacatagataacacaattgggatgcaaaaatatctcagtaggctgcaatgacaggagaaaactagcagagtaatatccccatggggataaatgtgaagtattacatgtagattcacaaacatgagtgcctaagcatgataggggaaatccaacttagcacacatgttagtttttagttatgatggaaacagctatgaaaccttcactgacccaaaacaatatcccccaaatattgtgataatttggcaactctcttgatgttgttgccatttttggtgggaagagagggatacgtatttacatgtatgttgaggtgggagagggagagacatggaagtgactagaaaagtactctccaccgcttgcagtgagccgagatcgcgccactgcactccagcctgggcgacagagcgagactctgtctcaaaaaaaaaagaaaaaaagaaaaaagaaaaatactctccaccctgtttaaaggttaaaaaggactgttttgggattgtgatgttcactgctccacatgagtttttgttacaccaatactacctgttttagttgtaaagcatcactggtatgtgactgagagtctcagtgagacatctgagagccaaaacactggattatttagtttgggggaaagaacaaaggctttagagccaaatagatctatt

SEQ ID NO: 139139 - DNA, 1062 bp, Homo sapiens
ttctgttagtgagccctacttcatagaatgatgttaaatggtcaaagataattaaaaaatctagaacagatgctgaaatgtctccacttccatccccctctgtaaacaccagaaaattatttttaagatgcctggcagactctagtgcaatgaagaaactaacttttgaaatagaaagttaaaattttttaataagttaattagtaaagctgttaagtgccaaaggagcactcaggacattccttagcatgtgattttaataaaatgtttgaaatgaatctcagacatgatggaaaacactccaagtaacttgttttcatagtcttctcacaataacaccagtgagagttgtaaaacactggcctagtgcagtggttgctagaaaagccaatattgagctaaaatttctaaataaaaggagaaaccttttgaaagtcaactttaaataaaagaccttcccaaatggaattatgtcccagtgtctgtcttacttgttcacaagtgacatggcagaactctagtaattgccatttatttccatacggagccagaatgtgtgtgtgtgtgtgtgtgtgggtgtgtgtgtgtgtgtgtgtgtgtgtgtgggtgtgtgaaggacagagtacctacaagacatgttagcaaaagccaatgaatgacttctgagtcacaaaaggacaatgtgagttagtccttaaataccagacttagactctgtggagttaaacattatttcatgaagtaaaagggaattctctgatatattccaaaacggatttatcattaaaaaatcttctgtcactttgcctaatagcctgaaaaataatcacaatgtctggtggctttggggagcatgtgtttttaatatcttaattactatatacagtttaataacactgcaccaagaagaattcccaagtatttcatactaaatttcttgaaaatgaactatttgctatatttagaatacacaggattaaaggtacttaaattaggtcatgtattttagtccttgcatattaaattaaattactcaaaaatggaagatgagtcagaaatggt

SEQ ID NO: 139140 - DNA, 1513 bp, Homo sapiens
ggaagattgcagagaggggcaagtgttaagatctgccataagcaatgagtagggtttgagtaggtaaagacaagcaagggaggggcagtcataagaaagatcgagtgaagacctgtgggcggaccccaccctagaaaatgggaaagctgcatcagacatgggcttctatatgatcaggcagtcactaaaaaatatttatagcaagtcctttcagcaaaggctttgggcacagtagaaagaatttgggctttgtatccaaatggatctgaattcagttatagattttgctaggcgcataactttgggtaaatcagttaacctctctgagctttagttctctcatctgtattatggtaaagatatcaaaaactccagtgtatatctatcatatacatatatataatatgtacacatagatatatgtaattgcatgtgcatgacaggcacttaatatatggcagttagttgtgaggactgtgtttaggattttctctataggcaggacttgagtttgaaagggagttccagtactttctgcgagtctaattcttctcccccagttttgtatgtttgtagatccctttgatgcatctcttctttctctcccatattgtctccttcttttcctctcctctaactttcagccacaaaagctgaaaccagctgacaggtagggagatgtacatagagtgagaaaagtcgctattacaattcctttttcctacctctggccatgaatatgtgcatgaacattttcagtttctatacaaataccattgagcagccaattaattctcattgataaaccagttttacctgtttcagttgagctgttaaaattggttggactccaaacacccacattgattttttttctcatctgtgttgctttatatagccaaaacacattttttcagtccttaaataaaatttatattttggccatgattcgatctgaaagtgagacacttcagggaagtcataaagaagaaagtcatgatgatgatgatgatgtcgatgatgatgataatgataatgtgttctctttgtatagcatttacccatatttcaaagtgatgtcatgttctaaagtctaactgcttaggaaaaaaatccaacttggaattatataaggtataaaactgtgacagaatcttttcaagaactcattattactcttaaaccttatctcattttcactgtttttcagaaggtaagggataaataatgtttgtcctttttatagttagagaaactgaggcagaaagccattaatggctgtatagacatactgccaaaagatccagtgagttcagtttaaaactcaatcaatcatccagatgtttcctatacactgccaaacatctggattcactgaatgcctgactaaatcggcctaaagatttggtgatagggaggaagaatcaagttaactttctaagttcacatgtaattgagtggtgaatctgagaatgtgatgttattttcctaagccccttgctcggtgctgcat

SEQ ID NO: 139141 - DNA, 1124 bp, Homo sapiens
gatacccagctccagagcctacaggaaatggtgggaggaggaagaagaggagaaggaagaggtaaagaacatggaagaatctttctccttcaaatgagtagaaggctcacacacagtgaaggttcattctgtgtgcttcactgtcatgaccttgaacctcccctagcacagctctaatcactctgcctggtcattggcccttactcttctagactccccactggactgagagcacaataagggcacacagaccttgtctgtcttgttcattgttgtattcccaacatctaggggaaaaaaagcatgttgtatatatttgttgattgttgaacgaatttttttttactgtaaatagacactatgtggagtggtctacttttgcaccatgaggtcgtctcatgagcttgtggtcagtctgactgttgatgccaaatacagtcagcttttcctttgtttgggactttctttgacaaaccttttctttaccttcacctttacagatacagccaaaaggcagcaaggaatggaatgaaaaaccagttcaatctccatgagctgaaaatgaagggccctgagccagtggtcagtcaaattattgacaaactgaagcacattaaccaggtatgtggaatataaaaaataataataataaaaagtagaaataaccgagagagaggaggagggggagagagagagggggagagagaggggggggggagagagagagagagagagagagagagagagagagagagagagagagagagagagagagagagagaaagagagatatagccagcttccactgttcaaactatattcttgggcttttaggaaagacgctattatttcttcaaatagtctgtctgctagaaaggacttctggccttatttttcaccccacttttaaattataaagacaatattgcaatttgaggggtagcttggaaaatagagggaaaaatatttctcacaatcccactattttatcccaactgttttcatttttacatgttctcttctaatatttgtccagaaaggcacactcacacagactttttccataattagaaatccacaagtgatttgtagttctgaaaattaacactatcttggaaacactt

SEQ ID NO: 139142 - DNA, 1093 bp, Homo sapiens
ggtgcagcaaaccaatatggcacatgtatacatatgtaacaaacctgcacacttaaagtataataaaaaaagaaaagaaaaagaaagagaaacagatttacatgccctgggtttctttcctagattttgcttcctctctactgaaatctacttgtaatttctgaaaggctgttgttggagaacacaggtacttcttggagtaaagtggatatatctgtttctagcaccctcgtagcttaacattggctctgaagtagtactgctatgcaaacaattatgaaagacatttttttcacatgaaagtttttagtttataaatcctctcatgaaaaatccacaatggccgcagataacatattgcagccctttacttcttcgactttttgccagcaccaacattggcctttgcggtccccctgactttctttattgggttcttgcattcctttcgttgctttcttgaggtctttttcttctcatacaggccatgtcttgcaagtctatgtttgggttcatttttctttgcataatccagggaatcataaatcatgccaaagccagttgtcttgccaccaccaaaatgagttctgaatccaaatacaaagatgacatctggtgtggtcttgtacattttggctagtttttcctgtcttaggcactctaaatttctgtcttaggcactgttgccttcctggggtcaaggacatcaatgaccatttgtttcccctgaagtagtcggttggtcatgaactttgtagtttggatagttaccgtgtcgttcatgatggctgtctatcctcagacagccagggaggagaaagacatttttatttagatatgtgcataaataaagaagaagctaattgtttctgtctttattaagcacatttacaaatctcagctcttttcacctttgctttattttactgtgcatttatgtaaattaacactgtatcatggataaagaaaaggacgttttcttaggcctcttaataggatggtttttctaccctgttttctggtttgtctttaaagctatttatgctctttaaattatccagtttttcccacagtgattgttgtggccagaatg

SEQ ID NO: 139143 - DNA, 1040 bp, Homo sapiens
atttgtaaatgtgcttaataaagacagaaacaattagcttcttctttatttatgcacatatctaaataaaaatgtctttctcctccctggctgtctgaggatagacagccatcatgaacgacacggtaactatccaaactacaaagttcatgaccaaccgactacttcaggggaaacaaatggtcattgatgtccttgaccccaggaaggcaacagtgcctaagacagaaatttagagtgcctaagacaggaaaaactagccaaaatgtacaagaccacaccagatgtcatctttgtatttggattcagaactcattttggtggtggcaagacaactggctttggcatgatttatgattccctggattatgcaaagaaaaatgaacccaaacatagacttgcaagacatggcctgtatgagaagaaaaagacctcaagaaagcaacgaaaggaatgcaagaacccaataaagaaagtcagggggaccgcaaaggccaatgttggtgctggcaaaaagtcgaagaagtaaagggctgcaatatgttatctgcggccattgtggatttttcatgagaggatttataaactaaaaactttcatgtgaaaaaaatgtctttcataattgtttgcatagcagtactacttcagagccaatgttaagctacgagggtgctagaaacagatatatccactttactccaagaagtacctgtgttctccaacaacagcctttcagaaattacaagtagatttcagtagagaggaagcaaaatctaggaaagaaacccagggcatgtaaatctgtttctctttctttttcttttctttttttattatactttaagtgtgcaggtttgttacatatgtatacatgtgccatattggtttgctgcacccattaacttgtcatttacattaggtatttctcctaatgctatccttcccccattcccccatcccacgccaggccccggtgtgtgatgttccctgccctgtgtccaagtgttctcattgttcaattcccacctatgagtgagaac

SEQ ID NO: 139144 - DNA, 2704 bp, Homo sapiens
aaacaaacaaaaaacctttgccctaggctgagactccagcctgagtcctagctctactgtgaacttgttgcatgaccttggacaagtcactgcacttctgttttttcttttacttataaaataaaggaatttgacaaaatcacctctaaagcactttccacctataacaggctatgagatcctataacaaagatatttgatgggggagggaatatgaaaggaaagggaacaccataaagctaccttaatgactttgaatttgatgccttcccaagtagaccaaagtgaaagtgattcgaaaggaaccccagggtataatcattctcctgacgacagcagtgagctcttcattttactcctccaggtattattggagctacaggggagcaggtaggttggctgtttgagatgtcagagttgttctcgatttctaatgttggagagtttggggtacaactcacataattaaaccttaaagaaaatgtttcccccatagcactgcataactccaatggggcttctgagcaggaaaaagaaaatggaattcaatgtctgttgctcccaataatatttgacacaactgtccagaatgaaaattagaagccctctaaccacagagatatataagtgacaggagagagacattgggggagtgccaagggctgaagggcaggttaagagcaaaggaatacaaagtggctaagaaaaccagagggagagagacaatttccaccctttccaagaccctccaggctagagggcttgggtaaattttgacctagttgtccttgtgtgcatggctgtgagcttttattaagtatttatgcagcagtttatattttaccaagtgctttacaatcacttttatttggcttagtaaagttttcctggaatcccatctactttatgatcagaagagtcatttcttgtttgcttagcacctccatgtgtacagcctcacacaataggccacttgttccagcaggagagcaggtgcaaagagttgagcagtggagggcacctgcagctaccagggcagttggagtgggtgtagtttacacttcagctcaccttttctccccctttgttattctttcatgttatgttattgctggcaacttgagagtggcagggtaaggcttgggcctgtcgagtgcagagctgtcctgcatatggacactggcaaaggtaggctctttcccctgtgccagtgtctctgcccatgcccaccatggccatgcacttccaccaggcaaagacttgctgagtgtgtttctttctgctgcttcagggttcttgctgcagccttggtcctagatctctggacatgagtttaggaagactatagaaagagcagttctactctctgcagacaagaccagccagtgttcttggacaaatctaacacttagctaccttattcttggtagtcccttctcccttccagcaaccacggcagcccccctgcaccagcactctggattttgtgatgtaggatggtgtggctgtatagatggctcatgaagcaatatggctacacactctcaatcaccggtttgcagtgggaatccaacacagtcatcagttggatgtttccttttctgaagaccagatttgccaaggcagaaactaaatgctggttcgtgaagtccagaccggaattagtaggccagaacattggaaaattcaggacctccaacaactaaagttctgtggctgagaacagggctatgtagatgcttaataggtaagtgtagaatagatgatgacactcagtggagcatagaaaaggaactctgctgttctctaggttgccactggtttctaaaatggtgtgatctggcaggtgggacacattgacaggtttacctcgaagggcccagtgtaacataggtcctcagtcagtggctgcagatttgggggaaaggccccaggggcaacaggttgacaagggttaggcagagtagcttagagtctccatcacacaaactgagcattggatggggccttttatctcaggtcagttcagtagacatttattgagtgggtactgggtgccaggtactgggtaagggagtgggcctagaaatgaatacagacaagagccccaggacagagttttgctcaggaaaacacagctggcaagaggaagtcatacctgaacacccggggctcactcaaaaaaacatgaaatactggcttggaggaacaaaacgaattccagagcctggggcctgacaagtgagtcagttaaactaacaccttcctgcccttgtcactactggctcaggatctgggtagggctaattctgcaggttgaaggtttgaggcctggaagtgactgtgactaaggccagaggagctgacggaaaacagtggcaggaatgtttagctttcttttcaagtgtatcagtagcacctatttgcatgaaaacagtttgttctttgaggctgatctttggcaatttattaaccacagttcagccagacatccaaaagaacactgaggagcctttcctccctctgtttactacatattctagagatgccacacaagagaaaaatccaccaggcacactttttcctgtttcagacttgcctctctcccaaacgtgtctggagtcagttaagagtgattgtttaggtggactttgagagtcctgttcttcattttgaagatcaccacattaaagaatggatgttt

SEQ ID NO: 139145 - DNA, 1061 bp, Homo sapiens
ttcaaaaaaacctataaaaaagcccttgaagatctttactgggagatagatggagttaggcctgatattggctcccttcaataacccattcttaacttttcaggaacacctacccccctctcatttttatgttatttcctcttttttctgcaaaaacatcaaaatcccaatccttggtcatggttggttcaaatggtgggcatttgagtccactggggatcaagtgagagttatttgcatctaagggtgtgcgctaggctggccttcttaccttcagcatcttgtttcacagcaaagacatcttaaaccatttctcctatgactgctttatagagattaactcgggcaatcttcctaaattacattaaaaaccatgatgagtctagttgcaggtcaaaaatagttgttcagtgctctaaagtcctttctgtcacccttgagttagcctttgtagaaaaggagaaagatcattaaaatcagtcatgatttcccaatttctcaagccaatgaattttattcttttacgtgagtatggctttgatccatgggtttgtctcatttagaatgtagtttcatttccctggaaaagaaatttgttttaatttgtaactccagtgtcacaggagcttcctattttttgcccgctgagatcttagtgatccacatggtcagatggatcttaaaaactacccaaatgaactttttcttggtttgagccacttgttggcccattttgtcattgttctctttgcttctaatcacagcttcgggcctagagctgggatgagtacttgttcagcaggagccagagtaaggtgttcccacctggggtagggatacagcagttggggttggagggatgcatagaggattgcactatgtaagaactcatgctgaaaagctaatttccaaatactattagggagcactaagacaaggaccatcttagaatgggctagaaaaagagccattggctagcttacccctacttatccttaacattatctcttctgaggaccctggatcctcctgtccacacctttgtctgggttaaggcttgc

SEQ ID NO: 139146 - DNA, 1108 bp, Homo sapiens
cagtggtacgcagcagttgctatacatcgcttccatgctctcgtgctaaaataagttattatttgttgttgttgttgttgttttttaatttatagggtggcttttctccaaagtgcccaaggcagtatgcatacaattttaaatatagaatagccaatgcaaacatcaatggggaaataaataaataaaatacagagccaagaggaagagggtacagaaaaacataaacaatggacaatggaaataatattcagtagcattgagtcaggtccgaaagtccattgattcaggcataagtcagactaaagtcatgctgaaggtgagactcagtagctcttctcagccactgttgtggtgatttgagggttagaaactgaggtatagtcttcaacttcccagctctctcttctcatagctagttcttcctttgcccctatattggaggaggctctgcttatgaaaggctggtgggagggacagagggacaaatagggctttggtatttgatttatcactatctatctccacagttcctggtccccctaagacatttttggatttcatttctactttagttttcccaggagcagaaacatgacacttcattttttccgatttggggaactgctatgttagcctgagtgtgtgcccaagaatgaacatactgaagtataatgatgctttgctagtatggcagtttacatattctaccttgccttagataagtcaagattgctcttggaaagcctttgaaggagaaatggattatgcagaaagtgacttaatttggtatagcatgaaatatttatggcagctaagaatttttttaaatcctggtaaggcagaacagatcagtttggagagtacccccatgtaataatctctctatggacttagattggcatatttttcagcagcgatttatcttagatgtagtctttaatgacagatatttatcaggacatactctcgtggcaatacagtaacatttatcccttaagattatggtgtcatatacagtagctttaccttcagaattgagtgagaaaaacacagcttatgctgctgacggatggcttaatacagtgtgctccattcaggatgtgtt

SEQ ID NO: 139147 - DNA, 1050 bp, Homo sapiens
gtgagtcacttaacctaaaaagtcttaaggtcctcctcctctgtaagggaagggcatctcacaggattgttgtaactgttaggagaggtcataaatgaaaagcccctagcaaactggcacatgctggaagctcaatttatattacttctctatttttccccctttccccttcactcctcctctttccaacacaaaacaaaagacatgtcagaaaatagcttgttcctcatctatgctattttactgacatgggacaatgagaataaggttgcgtgccaccctgaatgaggcactgaaattgtatggagatacacttctctctggcaaatgtaaatcagcctggaaggattaatggctccatgcactggagaaataatgtatatttgtcatcctaaaagctcatcaggtactaagaagaatcatgaacatttttttttaattttcagaaaaaaacagttggtatttggctttataaaaagctgatgctttaaaactgatacaaacaataactatttgaaaaagaatatatccacaggtcaaatatgtgcttcttacataaacttgatgacaaaccattccagtgccttgtccagtgttatgttactttagcgaaaaatgaacaactcctgaatatttgttttaagcagcttatcttctaaccatggtttcttattaaaaaggaaattttactttacaaatatatttatttactgatgtgttcattcattcacgtattcattctaacaaatatttgagcacttatccaatatcaagcactaatatttgtttcttcattgtgattgtttgaagcaaatattataaccctgctggatttatcttctattgtttatggtgaaaaatcagatcgatccagttttagttaattgtaaaataatttattcctaggcctatgtattttgaattagtggaatttttattgaattttgctcatactgactacttcatgtttggtacactttggtgaagaatgatgccctggaaccaagaaatttctcttctatcaaatggtggattccgaagcctgctaaa

SEQ ID NO: 139148 - DNA, 1673 bp, Homo sapiens
atcaatgcacccaattacactcagaaaccaaaagatatgtagtgctccagtgtaccttgtaatcagcacctttgaaaatgtaggtaacagcattctgaataagaaaaatggaagtggaacgtcttagaaaatgaatgttggaattaaatcatccttctgatagaaacagcaccttatatggcagtcaactttttttctaatatcattttattgatttttaaaaaaaaactaaactgtggccttgtagccaagaatgtctttaaaagtcatttattgctctaatcagcctggcagagcctttctgtcatgctgataaggaaattaaacttttctcatactgagtttacttgcctcttatgcacagatgttttgtttttcttttagggaactaattcagaagttgaagtctttcatcagcttctatagtgctttgcctggctacatctgcagccatagccctgtggcggaaaacgacaccctttgctggaatggacaagaactcgtggagaggtgatcttttttgaaagttacatatagcaatatttgaggaataattgtcatatgtttatataaaagttaattatgtcttctatctccattaattgcaccagaaaaattctagagaaatctatgaggctggatgcggtggctcatgcctgtaatcccagcagtttgggaggctgaggtgggcagatcacctgaggtcaggagttcgagaccagcctaacacagtgaaaccccaactctactaaaaatacaaaagttagccaggcatgatggcgcaagcctgtagtcccagctactggggaggctgaggcagaaggatcatttgaacctgggaggtggaggttgcaatgagctgagatcgcatcactgcactccagcctgggtgacagagcaagactctccaagaaaaagagaaaacatctatgacattccagatgatgtctataatttatagccctcctagaagttgcaaagtttgaaacacatagagaactgtgtctgaaggcaattttacagagtttaaagcataaaacaactttcttttgtcttcgattcttccatctcctcattatgtgggtccttatttatttgatttgaagaaatcacattcatcttgaaagctatcatttattgagagttaattgtatattaagtaccatgctaagtgctttgtatgtattatttatctttataaaaatcctatgaaatgaatactgttattttcccccattatacagatgaagatagagaaaggaagaaaagggagggaaagaggaataccatttcactgagcaattttactgaaatattttatggagcatttgtgggttttgtttgtttgcttgttttgtttttttgtttgtttttttttttgagacagagtctcactttgtcgcccaggctggagtacaatggtgcgatcttggctcactgcaacctccgcctcccaggatcaagtgattctcccacctcagcctcccgagtagctgtgattacaggcacctgccatcatgcctggctaacttttgtatttttagtatagatggggtttcaccatgttggccaggctggtctcaaactcctgatcttgggtgatccacctgcctcggcctcccaaagtgctgaaattacaggtgtgagccactccacccagccgagtatttgtt

SEQ ID NO: 139149 - DNA, 1038 bp, Homo sapiens
ttgggaggctggtcttctattaactgactacacaacccccatcttctgcaccagttcttcctaaattttgcaattcccttttgtgaacttcttcatacatattaatactaagtgccattgaaaggtatcaatagcgtgaggcctgcgttgacagtcctctcaaatgtatacttcactgtagaaaaaaagccattttttatcttaggaaatctctgaataggctgtacttagaatggggcccccattccccgtctccagccttctttccaccagtggttctttgtcttacaagcttatcaccttttttgactctagtcatagctttgttctgctatttaaaattgggggaagaaattgaagtgcctttcagaatttgtttctactatcatatctgcacaagtatcatataattatattgcatttcttttttcagattggcaagttatgtgcccattctcaacaacgccaatatagatctgcttattatcctgaagatctctttattgacaagaaagtattaaaagttgctcatgtagaacatgaagaaaccttatccagccgaagaaggtgagaggtttcttttttctttattccacaatacaattaacaattgtattttaaggtcaaaaaccactagagtgaaacttcttaaatacatgttatttagttcttctgagtagagtgcttgattaattaaattttatcatctgtcaatgtttaaaaaaagatggtattatatccaaggcatatttaaatgtaaatttactgttcataaatatctagtacagcaacatgtgtggaaaggacttccctattcaagatcttttattgattaagcaaaattgtttctgcttacaatctggtctcgcgattccttggcttgctttgtagcttttcccattattaacagtgagtcagagttaaattcaccagagagaagctggtgagacacattcatgtgtatacacagacactgcacactttacacaccttttaaaaatgataaaatgaaggatctggttcctggttcttaaaaca

SEQ ID NO: 139150 - DNA, 1747 bp, Homo sapiens
cacctcctatctggcttcactttcaacatgggagatcacatttcaacatgagatttggaggggacaaacatccaaaccatatcaggcgaggagcacagataatacaaaacagaaacattctaccatttgtgtttgtgtttaaaatacatttagtttggggaagcctctgaactctgtttgctgaaagtgaaattcaactgaggaagaattccagaagcaggccatgtgcaagtccctgcccttttctgggcctcagttccctacctgtagaagggagaattgccctaactagtcacacagtctctgccagctccgatgtccatgtgtctgtgagtctagacatatggaaggcaacaggggaaagccagttttagatgatgcacaaagttttattgggcagctgaagttgtgcaaatactaggggggaaatcacaagctgccaaaatagtgtcacctcattgatagaatggacaaagagagaagtcaattctaagtggaagaaaccatgactgacattttaggaactgatcaaaagaagcgatcggaggaaagtgaaaataacatctgtagacaggaaggcccgggacgatagcaatgtgtaatgctgctgtcacagagggaaatgtgcaagatgagtctctttgtgctgtttttgttcaggggtcagactcttctcaattcacctgatttttttttcctctcctttcaatcatatccttttcaaaattcatctcagaagtgtttctcagccattctgattacaacttttgctaaaaccaatcagcagaggtctgcttacagtgcaaggcaatcaacagagacccaaggtattggtcagagatgatatcttcatttagatggactgtggctaatcggattggctgaagttacaatcagagcaattttgcaacagcactgctgcctaccaggtacaaagcttcctgtacaattttaggaatgatgcccggttaaatatagtgttttatactatttgcatgacaaatgaattatgaaaacgacatatgttgcactttaatattttcctttatagcctgtaatactcctttagcctttaataattgaatgacagtgagaaaataagatcaaaatttggcctcttctaacataccgtgctatgtggtggtatcctgtactctgaaccttgtaaattggaaaggcagtgacattgttttatgtgatttggggttctgtgatagggtggtatgtaatgttccatgatagtcaatcctggttttatatgccattcccatgcattcccagaaaaaaacatcttaaatcagactcaagtcttaattgtatatgataaataggaacagacaggtgaatagtaacaaactttgaaaaatgaaatacaggtacatattagtcaatatcagataagttacagactataaaggggctcatcagactgtatccgtatgcataataatattatgattttattgttgaggtgtaagtgttccttttgtatttagagtactagatccttattagatatatgatttgagaacgttatctctcattctgtaggttgtcttttcattttcttaatagtttcctttgaagccccaaagtgctttaatttttatgaagtccatttcatctattttttgctttggttatttgtgctttcattgtcatatctaagaggacattgtcaaatccaggattacaaaaatgtacaaaatttttatttaagagttttacagatttagcacttaatttt

SEQ ID NO: 139151 - DNA, 1003 bp, Homo sapiens
gcttcctggcccatgttgctgagtctgtaacctaggagcaaatacaaggaacatacaggtgtcagtcatgatgtcaatatgcagagaggagcaaatcagaaagtaggaaatccaggtgcggagggagtttcctgataggaagagcacatgggtgctccagcttttacagtggccagtgtggccactcggtttgttttttgtttgtttgtttttgttttgttttgttttgttttttggagaaatgagagccaacagaaagatttgtgaacctggaagcaggtgggaagaaggggagaaggaatatttgagcacatgggatcaagagtaggaaggtgaggtaataagagagtgactgcctgctgagagggactccataagaagaggttgagagagttggcagatgagtgattacggaagtgaataattaggggacagcaaaaagactccagggaattcctaacaggctggtttgctccttagacatttgtacaagcagtatttttagagtgatcgagacaactgaatgctaacttcatgtagtcattgctacttcctgtgtctttattatcattatttgctttttcagtgtttatgatgactcattaatctggattccctgtcttacagttgatatttgagacaatgtcctaagggagccctacccagcagccttttgcagaggagttgtaacctgaatgctaggtttttttgttacccagctgccaatgtttggatcaaaacaatccatttctgattcatgtatgttattagctctggcaggatggcaggacgtgaggcagatactgttttgtatattacagaaacctagataagcaaacagagaatgaagagattgcctttattagaaaagcaatcttttgcgatatttcttagcaccaagcaatgagtttttaataaaacctaggagatagagcgtttatgtatctagtctcactccccttctttgaatctagatatatgtgatttcatgatgctagcaaga

SEQ ID NO: 139152 - DNA, 1061 bp, Homo sapiens
agaggtgccatgggaggtatcctctgaaattacaagcttcccttaatggtctgttcttcaaaacatcctagagaaatactgttcttggattaggacctttgtttctgttatcaaaattttctcctcatctctgatcctgtaaagtatcctcacttatccttgtctctccttcctcttacctaaagtttgtggtttttaaaaaatcatttcttctttactttccatttagaagtagagaacgacatctggaatggccctcaaatatctagttttgtttcttcattttgaagactagaaaactgaggcatatgatttaaggcaaaggaattgccaaagatcaaccagttaatgtcaaaccagaactaaaacatggcttctggcaataacaccagtattctttctgccataccttcctttttttttatatatgacattgtatgcttctaaggcttatttttagacttattgtatcttctgctacctaaaaatattcaaattagcatctaagatgcttcttgattttctctgctttttgattgtaggattcctagaaatcacaatagatgcaacattagtatgtatttcaatgcacagactattatgagcatttttatgtgaaaaagagaaataaaataggcagaagatgacatttcttgccaagatattttcggatctgtgtttttacaggttacctgagaaattgtttatgatgaaggaatcaaatataaatacgcagttgagactaggagaacctctgaaatacggctcactatagaaatagtgaataaaaactttcagtcttgtttctctcagctttgactgttgcataagtctaagcaaatcaatataaaagtgtttctcaaaatgtgcttcagttatagccaattaaaggtcaacatatataatttacatgaaatggatgggcaggaacaaaaggtatctgttgggccatgaggaatgattctatttcatttgcagatgagtactataaaggtcattgaaaatgtgagatgcaaatcattgtttttttaataaagcattttttctaggtttggtctctc

SEQ ID NO: 139153 - DNA, 1926 bp, Homo sapiens
tacatggaaggagttccctattaactaagtttctgatttactcaactgcttattcctcttaacaaattattaatgcaaaatgaatgagtttcttgactgtagcaacctgctagcatatttttttaaaaaattgtgaaccctttaaataatctttgagcagtttcttcacaagttctagacaaaaaagcagggaactaaactaatgtccttactctggttaaaaataaagcaataattgtgacaaattggtataatcagacttgacagatagaagctatagaattcatgttagatttctatcagtctgaaaaggatgttaacaattcccagatcacagagagtgaaagaatacacagtggtggaaacgttttcctcacacatctgtgtttatcaagttttaaagtctgtttcctcccctaccatttctcctgaatctgtaatacattgatttaaaaacaattaatgcatgactcaaactgctctgctctgaaaggccccattcagaattgtctcggttctggttagcattgaccgaaaactctatgagataccaggaataataaattacaacaaacattcatttttaatggcaccatagagatttttaagagcaaacctttctagatggaaagctgagtcaataccctgcacaggaatggatcggcttggcattgcaaggagcagaggaagaaaaggttgtgtgatgcagtgaaaagaacatgggcttcaggagttaaaatgtgactttctctctctctgttttttaatttattgagacaaagtctcactgtgctgcccaggctggagtgcagtggcgccgtctcggctcactgcaacctcttccacctgggctcaagtgatcctcccacctcaccccttgccccatgccataagtgggactacaggtgtgcaccaccatgcctggctaatttttgttttgttttgttttgtttttgtttttgttttttttttagtagagacagggtcttgctatgttgcccaggctggtctcaaactcctgggctcaagtgatcctcccacctcagcctcccaaagtgctgggattacaggcatgagccactacatctggccagactgtgaatttctattcagctgttctttttcttagtgacctgaacatgtagtataatctctgagccttggttgcttcaactatagaatggggataaaaataccaacctcgcagaactactatgaaaattttgcaacaatgcctaccacgtggcagcactataaaatctgacatgtaacatgatctatttaatctgctgtgaggcaaaatagccttttcttcctaggccttctctcacatggaggcactcatctttggggtactctcattagtagcaccatcattgataaatatttacccgacttctgtgacaaaggccctatgtcaggagctgccaacacaaatacactaatatccccatgtccacagagagatatgttccaagacacccagtggatgcctgactcccagtggatgcctgaaaccacagatagttccaaaccctatatatactgtgggttttttttccctatacatacctacctgtgataaagcttattataaattaggcacactaagacagtaatgacaataactaatgatgataaatagaacaactccaccctttcctactgaagttcctgctagtctttgcattcagaaattgctgtgtctctgaacaagtttattcagcatgtatggctgtagtcctctgcttctatttgcccagcctttgccactaataaccaggagaatcaatcatatcccccagatgttcggataaattgattcacagccaagcagaccaagttgaacacacaggttttgtaactactcacagtggtcttcacagaagactcatgaataaagggcagtgtgatatatctggattc

SEQ ID NO: 139154 - DNA, 2343 bp, Homo sapiens
gtttatccctctcctggaaactttcccaaaactttctgtaattttgtttacttcctttaatccccaaaataactactcacatgtcttcacatggtggtttgcacttttatttttctacttgtacacacatacatactttattgattcatctcagcatttctcagagttagtgcttcctctcccacaatttcattaccttggcttgttctatgcttccttgaatattgtgtagaattgcaaccttttctaccaccattacttctccctttcttttttcgttgtgatattcattttagcactatctgaaatacgattcgttgcaggaagcatttattgagcatctaataatggaagcactatgatagccactggggatcagagggagtagctggaaagatgcacatgactctgttgtgttgccctcagcggtcacttggctagtaggtggcagaactagtatttaaagctgaacctgtctgactcaaaagctcatgctcttaaccattactctatattgctctctcaagcagttccattctcttcagcagaatcttttttccccaaacacagactaagtaggtttttattatattatttaatatcctgtattactccctactgtttttccagctgcacaatcagtttctgaattcattctccctccttggagacttttgctctagtatttcccaatgaagtactaaaaggcatgagatttacatcttcctaacacttaaaggaacagtgtagtttcatggaaaagaaggaatgtttgtgcaggtgatggaaggtccagtcacacagtcagatgacttggcctagaatctatgtgagcagtgccggtggtgagaaagaggttctcttccacttgcaaagttggaaatctgccgattggaccaacacatagtttttaatgcatctgcctttgattccggacagtagaagaacatcagatctccagtacggagtgtccttggtatttaataatagtaacattgcctactgagaacctaacgtatccaaatacatccatttcctttgctaggatttctgaggtcagtatttatttttgtgtgccaggaagctctggggaagattctctgttgatcctcaataataattaactccatcaaactcttatattttgctgtcagtgtgagtgactgtaactcgtcagaatttccaagattagccttaccttcctctccactgttgaaggctgaggttatttctcaggtgtcagaatgtcagtgtttttctcctcatgctatcactttggactttcatttttcagtctcagatagagataccttgtctgaattcatacaagctgttttcagtaccaagtgatttgaaagtgataaaaagaagtaaatggctcactacctaattagtgtctgcaggtcagcctctagaacaatggtaagcaactttacttacacaaggtttatttctggaaagacaaaaactgtttacaggttgccatcattttttcattcacaatcaaaatagcttcagtgatttccatggagaaaatacgtagttttaaaacacacattacctatttattgcaagaatacaaatgaaaaaattggcaccatgttttaggcaataaatgttaactttatggtaggtttcaaaaagtggttacataaggggagctttttaaaaatgtttcatcctgaaattatacgtatattacaggtcatattaagaaattagatgggttcttcataaatctagaattgcttgcccttgccttggcataatcgccagttgcttatatgttctgaatttttagagagaaattttacatcctttctgtggtcagtggactgatgtggcaggaacacatcctcaagagctgtgaaagatctgagatttttaccctgattgcaagcaaacaagctagcctactgcagtttcatcgatgttagttaatggcataagactcctgagtcagagatgaaggacagtttattgcttacagcaatagcagcagccagagtattagcatttgtgccagatccctgagtcccaattcccacagggtaaggcaaagagagctgaatgactcctgtacacatagtgagttgtattataggagagaaactttgaacttagggaactcaaatattttataatagatggtaagcccacctgctgtttactctaaagggaaacatcatctctatcttccaaggctgttggctatacaaagatacttgaaaaggatagtctgaaacaaagggtagtcagttcgtctgttcctaagacatgccaaagcacaagagatccatggagaattgtcttccaacacatggtcccccacccttggatggc

SEQ ID NO: 139155 - DNA, 1450 bp, Homo sapiens
tatttatttatttatttatttatttatttatttatttatttttgagacagagtctcgctctgtcgcccaggctggagtgcagtggtgtaatctcggctcactgcaacctccacctcctacttctaatcaattctcctgcctcagcctcccgagaagctgggattgcaggcgcatgccaccatgcctggctaattctgtatttttagtagagatgggatttcaccacattggccaggctagtctcaaactcctgacctcaggtgatccacccacctaggccgcccaaagtgctgagactacaggcatgagccaccacgcctggccatgtggtgcttttaaacacatgaaaaaaggaggtgaggaacttgtaaagaattaagcgcactgttttgatcaggcactagacatgaaggttcatttaggaaacatttattaaacatctgctttgtgtatggcactttgctaggtgctggatattcaaaactacccaagaaatagttcttaagtcttgaaaaggtcacagtttagttggtagacagacgtgtaactgaatacatttcaccatagtgaacacttcaccataatgtgaatgttgaaagggctgtgagagattagctagtccaatcccattgatttacaaaggaagaaataaagttcagggaggcttacccaaagttatataattaatggaggaaccagaagtagaatccaaggtcttctgctgctacaatgtaatactttctccataataccagtctgtccccgcttagacccccctagacttttactctaagagctccattaggattttgcaaacacgtagtgaacctaaattggatagcaatttctggctgccaatcctgctacattttaggtgcatgcacatgcgtgcagggggagtgcatttcatgtcattatcattcaggaagaaaggctttggctgtcaagaggtgctcagtgatgcaggccctttctgttttggcctttaagggcctgattgctcccagctcccagctggttatgagagtgtgaattctgccatccccggggaatgcctgaactaaaccagaaaacatatgtaaactctgccttgttcatgttttatgatcaccaactctaagtaatacgtaccaaatggtgggggtaggggaatcactggccagatgtgatccaacccatactcagtacgggtcaaaaagggactgggcatttatgagggcgagggggagtcggagctgcagaactctattcacattaacaaacccacagaatgccccaaagcaaaagctggtttaaaactaaagctttaatgagattctccagtagcaccctaaccttcctgttgcgataaaatgtaaaaccctgccattcagtcctgcttgaggttcagttgtggtgagagacttctttaaaaatatcctcttcctgagctctgctgggatatcctttc

SEQ ID NO: 139156 - DNA, 1752 bp, Homo sapiens
gtcaaatatttatctctgtctaaaaatgaaatgtcctgaaatacaatttctttttaactgaataaatcagtgtgagaaagagaaataacttctcatttagccaatttttaatcaatattttcatgaaaggccgaaatgttaactgaatcttggcttttgtcatttgaaatataatttgtgtgtttaagaatttatgtgcacatcagaatctggacttcatgttcagaaaggaaaattgatttataggagcaaacaactgcaagagtagaggcaatgccagaaatgaatgagagtcaattatttaacgcaaatgggaccttaatcaccacagcaatagagaagtctcaaattcattttcacactggattttcatgctttaatttgtacacatttttgtgtctcttttttttttttttttacagaggcctttgaaattgttgttcgccatgccaagaactacaccaatgccatgttcaagaacaactacccaagcctgactccacaagcttttgagtttgtgggtgaatttttcacagatgtgtctctctacatcttgggttctgacatcaatgtagatgacatggtcaatgaattgtttgacagcctgtttccagtcatctatacccagctaatgaacccaggcctgcctgattcagccttggacatcaatgagtgcctccgaggagcaagacgtgacctgaaagtatttgggaatttccccaagcttattatgacccaggtttccaagtcactgcaagtcactaggatcttccttcaggctctgaatcttggaattgaagtgatcaacacaactgatcacctgaagttcagtaaggactgtggccgaatgctcaccagaatgtggtactgctcttactgccagggactgatgatggttaaaccctgtggcggttactgcaatgtggtcatgcaaggctgtatggcaggtgtggtggagattgacaagtactggagagaatacattctgtcccttgaagaacttgtgaatggcatgtacagaatctatgacatggagaacgtactgcttggtctcttttcaacaatccatgattctatccagtatgtccagaagaatgcaggaaagctgaccaccactgtgagtaccagtctacagttgtcagaggatttgggccttattggggtgaggtggccagtagcaggtactgatggagagaaatgagaacaaaattggaaggtggggaaggggtgatgatggactgaatgacctcacagagttaggcagcatattaagaccacaggctatgcaatcgtaaagcctggctccacctacttccttactgtgcgatgttgggaagtcattttatctttatgagttcatttttctgattcatgaaatagaaataaaaagaatatcgtcttcatagggaatgacatttgttaaagcacttagcacgtgtctggtatgtggtaagtcttcgataaatgttggctattattagcattattgtcagttatcataatcctcattattgatacacaatagatgacaagcctgtgaagtgggagctattatcttcattttataaatgaggaaactgaagcttaagtgaaattgcaacttgcctaagagcacccacgtaaagttagtggaagagccatgcttcagaaattgaccaggtctccctttaatttggttatcaccaatttttctgattctaatttcctcttggtgttttcaatcatgtatatcacattagcattttgagtagt

SEQ ID NO: 139157 - DNA, 1050 bp, Homo sapiens
ttttcgcctagtgttggtttctataagtctcccaggagcctttagttgaccagttatggcttggtttgttgtcctgtgatacagaagtaagtgggttgggcaaagcccagagatgtgctaagtggattctgagctgcggaagttggagcagggagcacatatgagcttgaggttcaaagtaaacccctagcccttttcccctgcaacatgcattgtgattattctttctgcagaagagttcatgatcttttataattttctttttctattgatttaggagtgctagtaacagaaacttttaaaaatgttatgacagtacagtcaatggaatcttgctgttgtacatcttgcacattggagaatgaatgcactgtacttgagataaagcttgccttgtatagaattcattttagggatgcttggatgattgagatctacaggagtggcatatccacagcagtcttttcccttctcttcattctgcacaaaggcaaaggtgaaaggtgtgactctgctttgttggtctttgggttgcaatttcttctagtatgtttccatttgaagatgggaagccaatgggaaaataatgagtttaaaatagaactgtactttctgcaaaggtttttgagactatatgtattggctgtaggtcgaaggcagcaagcgtgtaactgttatggaagacactagtttgtgctgattgcttctactttcctgtgtgaccacgggaaaatgctttaactctactgagcctcaattttgtcgcatataaaatgggagttgtaataccaaacttaaaagattgttgtaaaaagtagatgccataatatacttgagaatattttgtaaactctaaaccatatagcttgtgaatacttctgaaacaaggatggtttatcatttatctccatctacccagcatttatgtgcctctagcacctagtacagagtctgatatataacaagtgattgctagctgaaattaaaatgaatgaatagtttcaaatctccaaatttctgatgattttaacgaatttgttgactggtcct

SEQ ID NO: 139158 - DNA, 1049 bp, Homo sapiens
gaatgtcaaccaagagctttgaccactgctagggaagacagtgttgaactgctaatgagtccctgacaaggtgtttgccatttataaacataaacatttctatagttgctactcatacttgtgagaaaacattgttgaaatggtattttttctttaagtggtaggcatagctcctctccctccttctccttatttatttacctacctatttgtttttatcctactttgtccccagaggaatttaaagtgctctacaaatatgtgcataataaatgtaagatgcaatgcaactgaaatacataggaactatcaggcaaaggggaatgtaagatggagccaggtgtaagattatgacacaaagtacataatgaagtttattatgcttgatagaagcagaccataaatttggccctaagcgttctagtaataaatgtgaagagggaaaaatgatgagttacccaaattatggtgtccagaaggttaaaataaactagttgttcaggaaagctaatggtgggtaaacgagaagagctagttgggctaatgagttggtcaattgttgcagactcatacattttctagtagttagagctattcacttctcatttctgaggaccctttgactgaattattttaattgttctctctgatctataatagcctttagggaaatatctgtatctatctatctctccatctatctatcaaatgatatatataatagcctgtgaaaagcatatatttcttctttctttcactcattcttctgttcctcattgatgtacattgtatttagaagcctagtgtgtgaaatttaaaaagcaagactgtatatatttacaggctggtcatggatctgcacaaataaattgcttatatttaatagcaacttatttctaagctttgtccattctagttaaattaatgtgaaacataaaatgccagaaaaatctgacagaaattggagcaacacttttagtgtcttctctattatttagtttttaaaatgtgaggcttttcttagcttgcagtttctatgtggctgattt

SEQ ID NO: 139159 - DNA, 1070 bp, Homo sapiens
agggagagcctggcctttttgcaaaggctagctttccaattaaatagcagagttttatggttagagttgagagctctgagatttcatacctgtatcagtaatccctaggaaatgcacaatattgacctttttcacttattttcttataatttccatttcatcatgactctaaggcaacacaggtaatgcatttctggggaattattgttgttggtaagtagttggaatcattcatatttttgcatagttcatcacatcttacccaagttgtagagttattttcctgaaatatttagtagacccagtgtagccaaacagctgaggtattaagtttacttagagtcaaaccaaaaggaaaagaaaaaagaaaaatagacaaactacctatatctggaagcattgtgacatagtaatttagtaggtaagctctggattcaaactgcttatattcaaatcttggctgttctacttactgtctgtataagttttctaagttacttctctgtgcctcagttttcttatctgtaaaatgaaaacaatactatactcacctcacagggtggttctgataattacataaattaattcacataaaacgcttgaaacactgcctggcagatggtaaatgctccaaggatgctagttcttattatacctaaagctaatcttgaagtgctctgcaatatttgcccttgaagaagatggacataatggaaaaaatattggacaaataggagttctgtgtttcattgctgccaccatctactacatagctatatgatttggagccagtcttagtttcggttacctcgtctgtgaaattgggataataatgtttcccttagcgactgttcaaacacatgcatgcacgagtacacatacacacatgctcacattcaatgatagagaaagagaaaattaagttagaacacagatttttaaaatctgaaattacatgaggcattttgcagatatggtgatctgttgccatgtatactatgtatacttaagctataaaagagtcccagaacaaaatagattaatacttttataactatatggtattttat

SEQ ID NO: 139160 - DNA, 1074 bp, Homo sapiens
cttcgactttgcactaggcttttaggctcttcagatagttgctgaagtccctaacaactgctgtagaccagaactaaggtggtagctaagcctcagaatttagctggtttggtgcaaataggtaccaagtaatattttatttaggcctacatagattagatgacctgccttctagatcacactggtattatagtatattttccagtttattgaggtgtagttgacatacaaaaagctgtacatatttaatgtgtgcaatttgatgaatttggagataagtatatacccttgaagccttcatcataatcagtgccataaacatatccatcttctccaagagtttcctcccatcctcttaatttattattttctttgtgataagaacacttgacataagatctatgctcttggcgaaattttaaatatatacagtatcgttgactatagacactattctgtatggtaaatctctaggacttcatcttgtgtaactgaaactttgtaccaattgaatgatgatacctctctgttttgccctcacccaggctctgaaaaccaccattcctctctctgctttgatgagtttgactatttaagattcttcagataagtagtatcatgtagtatttgtccttctgtgtctagcttatttcatttagcataatgttctccaggtttatccatgtttttgcaatcagcaggatgttcttcttttaaaaggctgagtaatattccattgtgtgtacatgtgagtgtgcatgtgcatgtgtgtgtgcatatgtgcgtgtaacattttcttttctttctttcttctttcttttgtttttttttgagacagtgtcttgctctgtcacccaggctggagtgcagtggctcaatctcggctcactgcagcctctgcctcccgggttccagtgattctcctgcctcaacctcctgggtagctgggattacaggtgcatgccaccacacctggctagttttttgtatttttagtagagacagggtttcaccatgttggtcaggctggtctcgaactcctgacctcaggtgatccacccaccttggcctcca

SEQ ID NO: 139161 - DNA, 1422 bp, Homo sapiens
tggtatgcaggccgcctgggctctgccttcatgactaactcatgcactcttttaataaaaataaaaattttcatggtgaaaccccatctctactaaaaatgcaataattagctgggcgtggtggcaggcgcctgtaatcccagtgggaggctgaggcaggagaatctcaaactcaggaggtggaggttgcagtgagccgagattgcaccattgcactccagcctgggcaagaagagcgaaactccatctcaaaataataataataataaaaataaaaattttctaccccctttttgttatgtgaaatttcagtaacagtgaatatgccacttgaaactgccttcctctttccttctccaaggacaaggtctagtctcccatatcaggcattagagaggaatgcttcagagctcattttgaattccagctctgcaccacttacttgttgtgtggctttgaggaagttgtttctgctccctgagcctcagttttctcacctatgaagtggaaataatcataataattaaataataatgtaattaattaataaaatgtgaggggcacttgaaatagtgcctggtccaaacgaatgtgctatgctgatattagttcttgttactattgtcatcattgttcttgttactgttatttagtcatcattataaaactggtcttctgacatcacgttaaccatgatactcaacccagattgtcaatatcagcactgtctccagtaatgccatggcattcttaggacaaaataaacttttgttttaatttaatgaataaggagcatataacatttttagggggtggggtatgacgataccatcaacccaaatgtgctgatgaaagagacgtgattccagggaggttgggacctatcatggtgaatgtattcacctggttgtttgtcgggagcagacctttctccgtgttggtgtgtgctggcatgatgcaccacaccagcacctttgtttatgatcaatagtgacataggtctgctcaaataaattaacattcttgtctggcccaactcattttgagaaaactgatttgcaagccagtgtgtaagctgacccatataaccccttagcttaaaaaaaaatgtactgtataccattgtagttttactctaacaagcattgagcgatggcaggcaaacttttctttagtttagtttttttctttttatggctacatcgactgacttctacctggcgttctttgagaggcatgtggaaaggagactgaaaactaaatacaggagaaggaaagggacacagggaaaagagggatattggaatttgtcagcgtctctgaatactggtgtcttgttctatagtaaaacctcagatctgagcaattctgaagagcttaaacacagcataggaatggagcaagctaattatgggtctatta

SEQ ID NO: 139162 - DNA, 1239 bp, Homo sapiens
ccactccagttgaaagtgagtaaaaatatgggcatcacagtttagcgatctcgaatactagcagcaggcctcactgtggatctatgcgtagacgagacagaccaagtagtgctggaaaaggggtctgcgaagggctgagacatggggattgttttgtcattcttgggaaggccaggagggggcgccagtcatttgattgataccctataatctgtgtaacgagattctttgagaatgtgttttgatcagaaatagcaatgaatttggttaacaatatctcctcagttttctgctatatatattattagaaagatatatttagaatagataaactataaaaataactccataattacaaccctagaagtttaatatgtcacagactggaaaaggcttctttgatttgatagaaagggtgtgtttgaccattgttcactgtgctcacgtgttgatatttgctatgcacaccacagtttttcctttctgggaggctttttattttccattaactttgcagtcttaccttttccactgataactttttaaaatagttttgggtatgcacctttctttaaacccatgccccttttaattttttattttgaaataaatatagacttaatgttgtaattattagatatcatgaattatgcttatgattctcagagatggccagaggtgtcttcttcatgggttacatttttgttcccaaggtatctctttttcaaagtgatgctctcaattctgccaaagcccctcgtgtagtgaattgtttatgtccaatcctgtaatttccttgtcaatatacacatccttttgctgtgttggggaaagaccatgtaattactgaccccggcacgataccaatttttacaatcttatactgaaatagatttttgtgacaattagagcagttagacagcctagacagagtgcatgatcttgggccctaatgttagtaagatggccaggctatctgcctgtctgttcatatcaatctcaacatatctttgaatgtatcgctgagacatggaagcaacttacaggggcctccccaagaccctgaaaataaggaaaatgaaatcactacctaaaagttaagctagaaaatcaacaagctatggatgagaacagaactatgcaaattcactttgaagagactgaattacaaaagaacagtggagtcgcatatttgttgtctaattttgtgaagtataaatgtagtaaaaaaaaaaaaac

SEQ ID NO: 139163 - DNA, 1083 bp, Homo sapiens
aggcaatcatgtgcgtcaacatcaagtgtcctgtcacctactttgtttaacttggctaataggaacatgaaagcaaggtcatttgcccgaggatacctgagatatacaggcccatctttctaggccctgtaaaacacactttccatctcatcttaaagaacctcaaaaagctttgcaaactacacagtggtctagaattgcttgacacctcctgaaatgcaacctatgttgtgactggtagcggctgttaaataactcctagaaattctgcccggaagttcagatcagggatggggaggtagtactttgggttgctgtggttccagcacctccagaccttggatccctagctctctgtttggcctgatctgcttgggctctcctgaccaagctgagtcctaggacacctgaaccttggacatcttttttggcctgatatctgttgtgatcacacatccctctctgtccaccccctgcctactgaccccttgacatctacccaactctgctggcctaatgagctctcagaattggcccctgctaacctgtcttcttgctgcctgagtcaaaagctttggcagtctgtttgcatagatgtaatacctattcttgtggcagatctctatctgtaaccatgggaactaggcacagacatttatatgataagcatccagtctctctatggtcatctcttgtttgtcaatgctagtggagaggagtagagacataggtaatctgatagaatgggtgatccaaaattcatttgtatttgaagttgaaatggacatacacacttcatcaggcagccatatataaagagactgctctgagtctggttctgacttctgttttatagtaaggtgctaggaacagagaaggaaagggacatgggaaaaatgaaaagaacaagaggaagggaaaaaggacagaaaggggatggaaatatagaataggaaatgtgaagagacacactgagaggtgagtgcttctttgagttaaaacaggtggagtgctgagtgcttccagaggtaactgacttgctctgttggccttgtcttttccttgtgttccgtaaatgctaac

SEQ ID NO: 139164 - DNA, 1976 bp, Homo sapiens
tatctaatcctagcaaagcgtaagcagactctctgcctttgtagtttttcatggctatgaccactttatgtgaattaccacaaggggaagacatggtccctgacaggcagataaaggatagtctttccaaaggacattgttcctgaaaaatagaatggctttttaaatgttccttgtttctttcgattatatcagttgtttctggttagaatagccatatgtgtcttagcaatttagttttcaaaaacattacatgatccacacatcagatacttttcagttggcatatcttaggctgagaccaccatttttgttgattgttgatacatagcggttcagtgaaacaaatgcttctaaagagccccttctgtgtcaggctctaaggtaaatacagagacacaaagatgagaaagacacagtcctgaccctctagcggttcatagtccagtgggcaagacaaatggacagatattttcaacatattttgatagactcagatagaaacatacaaaatgtgccattggagccaatacaaaaacatggtctgtgactaatagaatctatttttccccttgctactcactaaatagattttttaaaaattctcccttcaactagcataggaagccactgacatcttcagccacttagtagccaacctgttaccataaggaagtgcatttacagtggggattctgttgagatcatgtgaggcggttgtgaaggcacgtttacaaccccaattgatggtagttacttttggtctttctcttcctccccatggggaagaaacagacaatgagtagagaccagaggaggaaaaagaagcaccgcaaaaaaggaatagagaacctaaaaggcacaaatagtgcccccccacccaaagccaaatgtgtgcctttgaggctaaaaaggtgactgaccctggtgttaacgttgtatattttcaataagctatattcagctgtctactccttgaatttcttcttagcaacttaaacacaaacgaggcctcctttgtgctcagggacattctcaagcacttacgttctttccttggaattcacaggccctgctctgttctgtgttttattgctctcagcttatttccttttctcttgattaaaaactaaagcctctgtagacatgataagttaaaaatggaacagacaccaagcattgcttactggtgtccacaccctggaccaggtgaactgaatccagggcaattgggataaaaacactatatgggatcagccttttgcacgtcttgttcaaaggaaaaagaagtgctttaaaggtcttgctttttcaaattctctgtggaattattttgataagtttggagctgtttattttttctttcattctgttgtctcttgtgcagatggaagagaagcctcctatattagcttagtttaagtgatgctaaaagggatacatttgccggcactatcagggggcccaactgaaaatgatcacctctgacagcacaagatggaccagctctttcttttcacctcctgagggtttaaacactctcaacttttttattaacaggaacttgcagggacaagcctgctaagcttatctcattccaaatgaacactttaattcatcaaaagcttacagtgaggctatgcaggtttatagaagaaataccatacaaaaggctctcagaggtccaaggcagtgatctggttctgaagctagagattgttggttttacacacaaatatataggctattagaattgtgagcagccgtgcagttgtggcctgaggggttgtgtgcaagattggagttcataaaaggatgtcacccagggtgcagagttaggatatttctgggtttggtgacttaggaaaaaatatgaggaaaatctgtttcgctttaagggttggagtacacttactaagagcatcagagcatttatttcacaagggggtattgtcaaacttaaatgcatacatcac

SEQ ID NO: 139165 - DNA, 1155 bp, Homo sapiens
gcaactttcgcctcctgggttcaagcgattcttctgcctcagcctcccaagcagctgggactacaggcacataccaccacactcagctaattttttgtatttttagtagagacagggtttcgacatgttggccaggctggtctcaaactcctggtttcaagtgatccgcctgccttggcctccaaaattgctggtattaccagtggagccaccgcacttggcccatttatgcactttagaaacaaaacctaataatacacttgtcccctagtctttaaggaatctcaggggggtagagctggtgatcagggagaattccagagatggataataggaagaagttgtagttttgtgggcacaacaccaggttcaagcaagcatggcagcatgtaataaatatggcagaagtctagtcatccaatcacctctagtctttctatatactggacattgtgttctgttctatagaaaaaagatgaataaaataaggtctttgctcttgagttcaaagtctaggtggggagatagacatgtccccagtcagtacaatctgattgcggctgagaccaccggactgtggttaagagcctggattcctaatccaaggtttgggggtaggactgtaacagcagcagcaaggcagtccacaggagccagggttctggccaagaaaccaagacagggactcaggcgagatacagtatcaagacagaggcagaactgctggaattgactaaagtatgtaaatcacaaggaattccaaaggcccagttattgcaactgggtaaaatgtcagagcaggactagaagacttgatgttgaggggtgacttgatgctgagcactgtgtatcctaggagcttccttaggttaggagattaccatgagcctaggtagggctggggtactatggggagtaataagtaggcctcatctgtagtcattcaagaaaatagtggcagtgaagttgagttagtttaactgtaaaggcaaagctaaaaagttctatgatttctaggagactaaaaaaagaaaaggttatttctgacactttataaattgcaccacttaagctgttggttagtttggaccaatgtgtcctctaaaatccttatttgagtggtgagtccccaagtaattgaggcagagggtgcta

SEQ ID NO: 139166 - DNA, 1838 bp, Homo sapiens
ccatgatgcatttcaatctagttgaactccaaacagactactggcactgtttttttctcaaattggactttcctaatgtatgcagctctaatggctctctctaaacagtctttccagaatgtacttaagaacttttctatttttgctttttgaatttgtagcccgccgtattacttgcaaagccattcacatgtgctttgtttctttcgctcttttaaaaatgacaacaaaaagcgatttcagaaaaaaatgagcccaaacagactagattgacggtactcatcaagttactacccgtctcctgacaccataataaccatatttcagagttgtgcatgcttgatcgttacaacagagtagatgaaatcagatttagagtggggcttggaattctctgctcaagtccacagaaatctgaaagccctagtttgtaatctctaatatctggtctagtctggaattcacaaaatattgcttgttctctgtgttgaagaaatggacatttctgtgatacatttagtaaagccctttggctctggggaataagtggatggtggaggtcaggtaaagccaaaatagtcttccaatcacatgacaacataattatttttatcggacgcaaacgctgaatttggctatttgggcatgttttagttattggtttttgcactgtgtcagtttccccaaaggaaccaatctttgggaagccaaagaaagaatggattgaagataccacagatcaaataaagtgcaaggttaatcggtcatctctgttcaaaagggtgctgcaattctaggtaactttttatgtcagtcagaaagcaggggcttccttccaaagtcattcatgttcctttttgttgacatattgactcatcaggacacctggaaagctgtagagcttatccttctagacaggtggctaaatgaaggtctagaagaggattctttccatctgtagtctcagactttgaccttttagactccagaggttatagctatctgaagcccctcttaagttaccatatgttctcaagcaagaagaatgagagtcacaatcctatcagagagaactatgctgggcttgcatgtgagtgaagaaagaagtatcaaggagagcttctgggacaaggaatgcctaaactgtagctttaagggtcaataaaaatttatcatgtaaaaaacaggcagggagtacaaaaaagggaatttcaggcacagagaataaacagcacgtacaaaagctatgtagcactgtatactagatttagaaagatgaatatgatccaagccctgcccttgtagacctcacagtcaataggctacctattctgacttcctttcccagtaattaagatggctttgtcctgatggtggatttaacttcaagcctttggcccagaggtagcttcaggacttttttttgagacagggtctggctctgtcacccaggctggagtgctgtggtgcaataatggctcactgcaacctctgcctcctgggctcagaggattctcccatctcagcctcccaagtaactgggactacaggcatgcattaccacttccagctaatttttgtattttttatagagacaatgttttaccatgttgcccaggctggtttcaaacacgtggcctcaagtgatcctgctgccttggcctcccaaagtgctgagattacaggcgtgagccaccgtgcccagtccaacttcaggatcgtgcaactgtgcagtcacacaaagccctgcactcagaagcgcccagtgcttggtttaatgttctgccattgccatcttttaaaattctaaatattttttgaataaggggaccacattt

SEQ ID NO: 139167 - DNA, 1041 bp, Homo sapiens
aatattccatctctgcacagatataatatagtatacctattagatttttgtgaatagagcagatatttgctagggctcattacttttatttatttttactattttttttaacctccatcaccaccaccaccacctaggattcattacttataaaaaaaatatgtagtgtgaagaaaaatggcaaatgcagagtggtaaagttttataacatatttttgggtcaatttttagaaattatttttaaaagaagaggcataaggtagggatgttagaattctagtttgtggaaatgcaagggatcttgacgtgcctctttttgaaatattatgttaagaaaaacaacttgaaatttagacttaaagaaggaacaggttggagagtaaaagagatgaatttagtgttttggccttggtatatttgagatgcttctgagacaccctatgggcttgtctggagctcaaaaaaaaaaggtcagggctggggagagattgaggaatcttccgaagagagcagagatgataccctaggatgggatgagttagtatagatgtcttgaaacggttaaagatacagattccttgggtcctgcctttggagattctgattcagcacatctggaatggggctcgatccccgcctcttccttaacaagctccccaggccattccgatttgcagccaggttagcgcattggctcatctatcaactcaggtcttggctgttgctttgttgcctctaaaggggatcataaaatgtgaaagattcttctcctgttctttcaaaagagggtagtttccaaaacaaagcaagtttgagagatatattttgaggaaatatttgtgaaaacaccagaaatagtggagccacttccatttcaatcttctggatttgatttgtttgtccattaaaaaaggggggggtaattatttgtgtgtctgtgtgtgtgtgtgtgtgtgtgtgtgtgtgtgtggatttatctcagacattgaatgggtcatttttttcatattttccaaagtcacataaataataataatttta

SEQ ID NO: 139168 - DNA, 1887 bp, Homo sapiens
aacaaggactcgcagaataaaaatactgtcagatcctaatggaaatatggatgtgactgatacagggcccttaatgttgaggtcaatatctcactccccttttatgtatagctcaataatcatttgttgactgaatagcattgctggatgccgccattgattctgcaggccaatgtgagttcttcctttcatttgtctaatgactctgagtaggaggatgttctgtggccaacagtaacactgttggtggttgttttaccagagactggaaattggattacaaggatcaactaggagtctgggaagctgcaacaaggatcaactaggaggctgggaaggatgagaggtggaagtatctctagctctttctcactgtcctccctgcttttcttcttcctagtgggtccttatagtgaattgatcaccctgatacttttcccctcctctccaaataaacctggatgtctaggcaaactagacatttggcttaacaagttatgaattttaacaaatgatttaaaaggaataccaacataactaacttcattgtaagtgaacttcctagaaaggaggcatacaaaattgcataaatatagctgtggattggtcaattatttttttccctgagtcatttctttctgcactcctcatattcctcttgcacacttcgtatagttgatgttttaccatttggcccttattttggttcacttcttctccttattcacatatgcttaacagtttttctccattgtctgtctcttttccacaccgttgatcttataacaaggatatgaataggaaaaagagaataacttgaaagatgggttaaaaacaacttttctaatgcatttggaacatgcctatgtctatatatgtgtcttgtccttgtatttgagaatacctaaagccaaaactgtctttttattatgtgtgaaatttcattttgtgcattatgcattgtttgtgggggaagatgtacaagaaactgtaggtggtgggattatacattttcaaagttagaacaggtatttgtttgttttctgtttttttttttaaatactcatgtcctgggcactttaaatacattatctcatttaattctcacaaaaatctcatgaagatgtggtatcttgctcatagtctcacagctagtaagtggtagaagtggaattggaatgcagatttgtctggctccaaagctccagactttttccatgacaccatactgcttcaaaatgtgaataattctgggtcttctacttcctgatattatagcatataaggaccaggcatatttccccactgagctcagtgttcttatattgaatttctttatatctcaaagtctgttgaatagtttttctatttagaaagcattctaagctttgagttgtattttgggatgggataaccccccattttatttccccaagacatatggagttctttgaaaaaatcaaactgtcatttgagactaagaaggaaaggaaagtcagagtgtgttaaatttccctttgtctcaagggcatggttttcattaagttctttgccttttttgtagggaacaaccctgtgggcctgggtgtatgtttaatgtttgcttttatgtggacctggtcttcttcctattctcagggtcctgtcatgattgcttcgtaatagtgtacccaagtcatggtgatgtcactgtagtgccttagcctttggcatttggccagtattgttaacagcgttgtcttatgtttattctgatgttgctttggtccagcagaaatgcatgggaggcagggaagctggagatgacactgcactggaacagtggttcttcaacttgatcttccttccaaatcctctggagggcttggtaaaacacagatttctagg

SEQ ID NO: 139169 - DNA, 1027 bp, Homo sapiens
ctctgattttgacagaatgtagcatctcaaacaaggcttacaagggttacatgctgtccttaattgaaactgtttgtctctcctagtgagcagacaagcctcagttttcggaaaccacatcagcagatttcattccagggtggggaactatttctgacaaggagccccgcaaagtatgtgtgcttcagagaaaagggaaaactgagtaaacaaatactccctttgctgaagggggatgtgggttgaaaatcatattatagaggaggtatcctggagtgtcctgagtaactagccaaaaatttgatctggtttctcttagcatggggtaactcaccatgccaactgacatatttctccagtgacctcgacatccgaaagtgtcccctgaaagcacagctgtctgttctccatgcttcaagcctcactattttccctaatagcctgcaagatgccattctgcagatgtttcttcgacatttcttaacacaagggcatattaggctcctttacatttctgacgtttgtacgattgaaatcccctcctggaaatccggggttgcttttatatgatgcaggccatccatgcttgagaagctggggccttgcagagcagcatcttaatgccattcacccaccatttccaccaactgcccaaatctgggtctacattaagttgcaatttgctttctcaggatattctagtgagcagagtggaaagaagaaacattggcatgtcctccagaattttaactaaccagagggctgtctgctgatgggtgctccgtgcaccactagctccaaacctttactaattatgcaaactcatcaggaatgtcacctgatgttcttccatttaatgagtggttgtgcaccacacttcattcattctgcatcagaattattgacatgatattgacattcaagggcaagctggttttctaatgcttgccagagaatcaaagtttttttatttcctaactttacctatcctttcagaaaacctgagaatgtcattgatacttaatgc

SEQ ID NO: 139170 - DNA, 3409 bp, Homo sapiens
gactgtataagatatgtatctcatgctgccctttgcattcttgttacaactttcattcttgtccttagggttggaacatttatttctcttcagttacatatattatcatggtgacagtgttaacaaatgtggtgtgaaaaaaatgaggtttccatgtttggtttctaagcatttcctgaccaggcatctaagttattattggcttcctcattgtcagtgggattatacagttctgttatggttagctatgtggcccaaactttatttcttagtgaccggagagacaatgaagataatagttcaggtttaggttagactgaaaggactgtagtgtgattgaagtaatggtaagaatagattttggaaccatatagattatggtttgaatctagattctaccattaaccatgtataaccttgagcaagtttacttaaactcactgaacctcagtttcattatctttaaaatggagataacaaactcacaggattgttgtgaagatcaaatgtgatattgtttatagcacacttgtcacttagcctgctattgatttacagagaggctaagtaacttgcccaaggttatattgctggtaagtggcagagttcagtctggaatccaagtctgcttgatttcaaagacccatgtttattctactgtgttttgttttgttttcccatttataaggcatttgatctgttattacttagaaatatagatgcttagtactggaaggaactcaaatgtcatctattataccactgatcagatattcaagtttccttcacagcatatctcacaaagccctgccaagattcaagctattcttgagcaccttagtttgtctatactttgcataatttttgctgatattgtactctatgtcaaagattgctgtcatttaaagtgtctaaccatgtttatattatgttggacaggacaccagtagaagggaagggactgtcaggaagtatgcaagtagaatgggagtctagtttaatgagaagcccctgacgccgtaagtgttggtagcaggttaaaaaaaaatccgcttgttctcactcacaggtgggaattgaacaatgagaacacatggacacaggaaggggaacatcacactctggggactgttgtggggtggggggaggggggagggatagcattaggatatatacctaatgctaaatgatgagttaatgggtgcagcacaccagcatggcacatgtatacatatgtaactaacctgcacattgcgcacatgtaccctaaaacttaaagtataataataataaaattaaaaaaaatccatcagtagagaaaaatcaccaaaagggtctccagtctaggattctcctgaactgatttcatcctaactttccatgttatgataaacataacatggaaacataacatggtttggggtcatggcacagcagtttcagaaataactgctttgacctgcacccacttttatttttactgaaatagggaatcttctcagattcccacagggactgggtagccgttcattgccatagtgcagacagctataactttacaacttgctcagagtttatatggcctaccactctattgggcttgttaaactgggtaatttgctttttagcttattataacacatattctattctgggggacaaccaatctattgcacttttcattacctgttgttcaataacaacacctaaggaattcagggtgtttggtgctggagtcctgctttaaatccttatcatttggattacacagctgatcagtgctctgacttctaatagttagactaactctggaaacacctagctgcttttagaccaatgtgcaagggtgggtggctctccattctcagctcatttcaattccttatctcagggagagggccatgcagtctttttggatgtcgtaattttaaaccacttggaataatattctcctttgctttaatgttatacatccctgtgcatgttcttcagtaattgaaagggatatcgggcaaatttgatctgtctagctttgacttatgctgtccttatcttggcctttgtgtcattaagaaaaaaattggtattgatcttggaccataccactacattgtgctgcaatttttcttccttgctagtggaatataaatcgataaaaggcagctgctttacacgaaggccagatatggtgccgtcatttatatattgtaaatccaatgatagctgatcaaatcagtgcctctcctgttccaaacttgacatgattgaattgtcaatagaaaagattttacagtaagagaaggaaagctgacagtgtaaatgtctgaaaacccaatgaagctcaatataaaataaaacaatgagctaggatatcattttataatttccaatggggaaaaaaagtgtttagtgaatcacagctgaaattgggggtgatcacagggagggggaagcaggaatgaaaagccagctaacttgcattataatttttgagaaatctgaaatgcaaatttgcagatgcaaattttaggaattatgcatcatagtcactgagttgtttatttacagaaatggttcaaatactctccatctctttcctcctccatacacatagtttttagtgataatacccagttgctggggagaaataagcctatctttccccaggagtcctgctgacttctagtaagtggcttgggaacaaatcttgtagaacttatccttgcattcttaaagtcaatcagtagagcactagtttcatttaaaagatccctagaaggagtcaggtttgtttttgtttttgtttttgtttgaagctgcagaactttctcagatatatacatcttgcttcacatgtggccaaccacacttcccttaggaaaactaaaaaactaaaaaagctgtaccccttaaaacttgaagaactcctgccaatttttcaggatacctgatttgtctggcatcactgtaatacaaagagggttagcaagcaaggatgctggctaagaacaacctcaaaagtctacacgctagaagaaaaggtcccaagagaaggtggtaaaaaaagtaagaagggaagaagagaggagggataaatcctagaggcaatggtcatgtactagatatatgggggaaaacagaggatggcttggaggagaataatggtattatactagcaaaaagtggacagaggtgagatcagtaaccagtttgcagcgaggtgatacaaaaatagatgttaaatgaagttttagacatgtcaactttcggggtacaatggaaactgtgcaatggaaaactgaaggcaagagcctgaagatacacctttgttttgtttatgggtccctaattaaacctgtgaactcatgccccagaaaatgtatgcatgtagatgcatgaaattttgcat

SEQ ID NO: 139171 - DNA, 1052 bp, Homo sapiens
ttcaatcaaaccaaagcaatctatttcaacacaatgattttgactgtgagtgacaattataggattattaatactttatttgtaatatgttttcctagcaatgcaaaattccagggtcaaaaattctatattttcctgaaagttttatcaccaagcaacaaatgtttctttggcttctgctcgctatttgtctaccataattttcaggcccatgatggatataaagatgaataatgcctacactaggtattattaccttttgttatgtggatgagggagctgaggcccagtcagacgttactcacctagtaagtggtagaaccaggcctccatttcaagtgttccgaatatatatgtatctctatagccccagcttacctctatcaagtacataatctgagacaaaaggaaataaatatttcaacagtttgaagagtttgaacagaactattcatgtgccagtattcccaaattatagataaaattgactgtgtaaagattgtgacactgttgctccttacttttatggaccacttaagaatgtgccaggattatacagaaattgaaagtattaataattggctatagtatttaccaaagttctttttccttctgatggcatcaaaaagctaattagtcaatggagtgcatatgtcattggctggtgacttttgtaataattagtgtacatttatgcttccaaaacaagctattttgaggttacctttgatcattaacttaccttcattgttcattcaccaggtgttgaaaaaaatgattctgttgaaaatgttgctatacaggtgtgtggctagaaagatcactttgtatacacttgaagactttcatcctttggcttttcggcacaaccccttttgtggaactttaagaaatgcatggagctcttgctatgtgctggccattggactaagtttctggcatatgtttcctcagtcatacctttgaacacagtcagtttgagatcctagtgctagatggccaaatcacactcttgtactatctcccatctaccagctatttgctcctctgtc

SEQ ID NO: 139172 - DNA, 2193 bp, Homo sapiens
cccagacaaattttatcctgatatttattatatggtctctcatgtgaaagataataggtagtagtagacaccttcaactatagttttgcaaaggaacaataaccctgttaaaatggaaaattcctgtattgaccttctacataagggttgagtgtgtaatattaaatcataattcagtttagacatttctttggaggctgaaataatacagtcctgatatgtggctttctgattatttaaaatatggaaatagaacttggagaatgtggttgatcatctagctatcatgcccactttattctttctttctcaagggtcagatgcctcaaggggaccattgcctgactatagcttgcataggaatcatgttggaaatcttggtcaggtaactctaggacccagggtctaggtttatccatacactttgagtaggtgttcgataaaattttgttaaatgaataacttaccagggtccacagcctggacagacactttcctccctcttagtactctctctctactagggagcaccttacgtgaatctgcttttttctccatgtactatctgactactctcttattcatttctcagtgatctcctcttcttccttctcttttttaccatttccacccttgtgcagtctgcatctgccatgttttggacaacagctgccacaaatacaatttgaatgcaaatacaattacatttcaaaaattactcctaccatattgcaaaaaatagaaaacaacaatcaagaaaagactggttaaattatgaaacagcaatatgatggaatactatgcagctgttgaaaagatgttgagaagatttaatgacatgaataaatatccatgatatatatttaagtggaaaaaactgtgtgtgagtatacatgaatttcttttgatatctatttttttctatccacctatcatttattgagagagtgagacatagagacacaaagacacacacacccagagacagacacacagacagacatagacacacacagagagtgtacagctttaggtggtaaaattaaaggtgattgcatttctttgcattttgcttctctgtactttaaaatttttctatagtaaacatggattatttgtgtttaaacaaaaaatataaaactccttggcatggcatacaaagccttttaataggcggtcagtgcatattcctctagcttctgttttaatattccctcatcctttgttatatgcgttacaaactccagtcacatggggccacttgaatttcccccagatgctctgggatctccctcccatactagactgcagactcctagtagcagttggtggctgggttgtggccctgtctgtatcttttccacttagtgcagtgcctggcgcttaacaagtgctcagcgtctgtttgttgaatgaataggcaatgtatcatatactcttctctcgattttaatcagaccctccctcctccttccttgtcactgatgcacttctgctgttcaattatcaaattatggaccttatatcatatgttaacatgggtttggagatagtcagtgaacatgtccagagttgtttaaccatgaaccttatatatatgttcatgcccttatacattctttagcctctaatcaagctcattccctatctatttcatgaaagcacaccttcattttaggacttattttgaacacataaaaagagatgatcgtaagacatcctaactataaaaacctgcagtatccatttccctcctgaaaaaacatatctggctctgtttcttctaaaagtaaaattagaccttgcagagatggtacaatttaaacggcaccacccaattaatttttctggccaattttatttttgaaacaataattaaacatggtcttctgtaacatctattctttcttttccccaaggagagattttgtattattttccttttgtctttgctcagcactttggagtgtgtgagttttcattaactattctgaatgcaggcaaaggcaatgtggtaggaacaaacacaaatcaaggccgcataaattaataatctttttagaaccattgtcctgtatgcctttagaaattaattttaataccagcaaacaagttcaaaaattcctccttctttagctactgtaagaaactcaaacttcctttggcaattttatgaatgataaaagctcactt

SEQ ID NO: 139173 - DNA, 1055 bp, Homo sapiens
ggcctagtccatccttgggagttgctgctgacaggacaaagcaccatagtcatcaccatcattactattactcttgcctggaagaattttgtcctcatcttcccgaaacagaaagtccgtactctgcacctgactctggtttagccaggagatttgggaggatgtaacttggtcaccataatttggcttgtgacttgagattgggggccaatggttacaaagttaacatgctaatttggtttactcctatctctcacttaaaaaaaataactaacttgattgaagctttatgtagctccagttcagcggttcaaagctttgaagggaaagaccattctgttggaaggaaagatgtggaatttggaagctcaggccaactcccagtccctgaagaaaaatgggtctcctgacatagccttcaataagcttctgggcaaaggggccatgaagccagccaaaagatctctgtttatctgccacattttcttcacataggtagaaatattatctttaaatcagcaagctgtacaatctgaaattaacaaaaaatattgaattatagagctgtgctgtcatgaaaatccaaaaattactgtcttcaaagttttgccttaaaaatccttttgttttcttgccggattctaggaagttcaacatgagaaaaggctgtattgtcagattgtatttcatggactcttaaagttgcaaggaaccttagagctctgcaggccagcctggcccccagggctaagtccttgctgtaacttcttgtcagaggatcattgttcctctcagagaggtagctggactgggcaaagctctggatctgtactaggctccgccactgatgggctgtgagactttgtggatatcactacttctctagcctaggtgtactcagacctaaagaagagagaagccagatgatcttttagtgttctgctagctctgacatgcctctggtggtctctaaattctggaatgtgtgaatatttgaacattttgaaaggatgattttttttcctgataatagaagtaacacgtttattttagaa

SEQ ID NO: 139174 - DNA, 1032 bp, Homo sapiens
tgagatatcttaaatgatatagatttttataactggggagaacaaaggaccaataccagtcatgtgcttgagaactaccatatcagtgttgatgactcatttgctttcacccaaacgccctcttgagtcctttaaacttttttcccttcaactttattgaggtataattgaccaaaaaaattgtgtatatttaaggtatacagcatggtgatttgatatatgtatacactgtgaaatgattaccacaatcaagctaatgaacacatccaacttgtttaaaataagtctattatcccaggattcccagacccccctgataaaagtcctgggtcttcctgcaaggcatgctttaatacagcttcttcccacaagggggagccaaaaatgctttgggggctaggagatgaaaaacactaagaggttctgaaaatcctgcttcctttctggtttcttttgccagtaaggcccttccagcagtctccagaaaggaaaagtagatggtgttgctgctgatggtagtgtttttgtatatggacatgggatgggggtagggggcttttatctgaagaaacttgatcctgagagataaagtccttctgagcaaccagtcagcactgtattctcatcacctatttccttctcctgctggaactttgtcctgcaaagctgcattcttttgccaccgtgtgggggaattggatcagctgcctgttgaagtctgctcccttaacactgggtcgataatcttgccccatcagcccattggagctgcttctgccacctcccgctaagggtgttaaagaggacctggtaaaaagacttctactgccttctttgcagaaagtgggtagatgttgggggagaaaatcccatgtgattatggcctttagcactgctttaactttggtagtaccaatatttcagttaagccaggagcaagaagggttgctgtggctttgacagataaagcaaattactgaatccacatttgaagaagaaatttggccccaaaccaggagtatgtataaagga

SEQ ID NO: 139175 - DNA, 1118 bp, Homo sapiens
tcaaaaattattttattgggtattcttcaaatgtggccttttacaatcacctcttgtcccaacctcagcataacttcagctttctcctttgacctactctgtctatataatgccctggttctgagaagcttagactaaaacttttgtcaaaggataggaaaagagcatggtgatgatggtgatgatggtgatgatgatggtgatgaagatgatgatgatgatgatgatgatgatagttaacatatagtaattttcttctatgtaccaaatgatgtgctaagtggtctgtatgcattatctcatttaaccatcacaacaacctcgcgagataggtactactatctttaaccccattttagggatgaagccactgaggctcccaagatcacacagtgaataagatatgcattcaggttgagattgacacctgtcttactcaaaatctctttgtaatcccttccaaaccccctcccctagcctcaatcaccttaataagtgctgtataccttcttaaaggatataatactgcctaaagtcactgagttagaggaaactccaaaggtcatatatatagcctataaacctacatatgtgagatataagacactatagcttctgctgttactttagtgtcctctctaagttgaaactctcaacagctcagtgaagtatctataaaggatattatcaccacttaggggatatgtgacttgccgaaaatcacccagtaagcttgtgatagagctcgaactagaatctaggcctcctaatacctagttcctttttttccttctattttagtgttcaaagttatgagtatggaaccacatttctaattatcattagccagaagatacacatgactgttctgagatgtctttttttttttttttttttgaaacggagtctcgctctgttgcccaggctggagtgcagtggcgtgatctcggctcactgcaagctccgcctcctgggttcacgccattctcctgcctcagcctcccgagtagctgggactacaggcgcccaccaccacgcctaatttttcttgtatttttagtagagacagggtttcaccgtgttagcagggatggtctcaatctcctgacctcgtgatc

SEQ ID NO: 139176 - DNA, 6579 bp, Homo sapiens
gagactatataccataaaggaaggttgtgcctttgaactttatgcttttaatgactttcatgaaaaaaaaattaatcagtgtcactagaaatgctagatttgttgtctatttccaattgatttcagtttcctatgggaatgtgaccagcattgatattcttgcagtctatcagcatgcatgcttcaatgctgcttttgtttggtatggccacttcagttggtttatgtgaagattgtgtatctcctagttcatcttccagtccattacccttctctatctgtgtgctctatgggatgaattccacagaacgttttaggaagcagggctatgatggatttattttaaggtaaaaaattatttctctgttttttccttgaaccactcccccaactccaatctcttttctcagtctcactctatatttctttaccccccaaaacaagcatagagtcagtaaccataaagtgtcatttgtctctgatttaggtttgagtctgaactaattttgaattcttggctgtaatggatgctttcataataattattggcagcacctctttccaccttagtttttattaatactgactgatcttgtgtaagaaatatgaaaaatatttccctttcctctatcacttcatgtatttgaaatgacatcccttctctcttccttcattgaagtggcagcattgattttcttttgttaatctctgcttctgttttcagaaacaacaatcagacacacatccctgcaaatagctgttcttttgtctcttctaaatagtatttttaatacaaatttattttcctatggtcagcttctcttgtacattaatagaagcaggcaccagttctcttgtacgttaatagaaacaggaaccagagaaataactcaaaatattagtcatgattctgactcccacccaacaagtcaggcactctgcattgcacttattttctgtaagtgggcaaaaccctgaggattaactagttctagtttggaaaacagttaattcatatgtttgagcatgacttatgaaaaatttcctgtttgtagatacgtgtgtgtgctcactgttgtaaaagatctttctttcaaatctgaaagccctgagctggagagctgtcatggaaaaaaggcaatggaaaagtctcctaaaattgttccaatttaagtcaacttgctccatttataaaactgttatataggcagtcggatgtctgctttcagcaagtgcatgcgcagtgggacctgaaattgagagcatgtgaaatccgcaattcgtatgataagatattcttcctgaataatgaaaattgcagtagggaaacaaaccttcaagcaggaatcagctttttaagcatttttttttaaaaagatatctgtgcccattatgaagtaagagagcgtaaaatgtaccttttggcgagagaaacaaaaatactccttactacagatggcaaactgtagacaaatgccctgtatgtggtatcacatgtaattatatcattttgtcttgaaacattttatgagtttgccttgctggatgtctgttgtctttatcttgtctcatatgcatatactcagttatatgtatgtatacatataatttgattggataaatccacctaaattaactactcttggctttttctttgccatgtggctggaggggtcacatatttgagatttcaaaataaagaacatttaaggtatcagtggaaaaaacttaggaaaaaaatctgttatctgttcttataaggagaagttcaggtaatggaagattcagagtgaattctatgagcaaagctggtttaggtgatgaagtttcaattgatacaactatatcaaagcttgtggtagcaaatcttagaattcttcatctataactaacaggcacaaagacaatatagtatgcatttattagtactgattaaactacaaatataagctattctggtggcagttagaaagcacaatgtaaagaaaataaaaggaactacttttttttaggatttcagaaggaaggcagttttacagaactgagtgagttctgccttttcatgttggatatcgttctggttctcatccagactagttcaaaagttcagtataataaatttatgatgactgtgaaaccaaactatttcttcaggtctttggagagaaatatggaaagagtagtggggaatactaatatgtactttcattagctatgtcatgtataaaggaggtaaatattagagtatttgtcattcacttcagaaggatgccattagaaaatgaaactggcaagaagtcttcagcagctcccaaaagaaaagttatgttttcgaggtccagtgtatcattggagtgggaagaggattatttccatatgtgtcagggttagtttgtatttgaggttatttaaaaagaaagaagttgaacctcattaattcagtattctgttaatttgtaaacaagattgcctgagggagcttttaaactgcttaaaagagcaaacttttcaaacactttagaggtagtgcctggtatactaatttcaaacagttatttgcatgtgaggcaaacatccttgctgggcaacattttgttcatttcactctagctatggtatgcacagtaatcctttcctaagtctgaattcccttaatcaaaattatagcctaggcagacttgcatctatgtacttctttcccaccatcatctcaagaattttggatagagatttatacaaatctccattcactccaagttttgaatttgggagcattatcaaggtaccccaaatctaacacctggatggaggattggtcaatgaaaaagtgtctcttaatattttatttgtaacatggaacagtgaatttacaaggatctcattaaaactgtgagagaggaagaccctggaaagtttgtaatcagcggattaagtgaaagttaattgtacagcatcctttagtgctcatttaccaaacacaattgatattctttttacttaatgtgctgtttctgttgctttattttgatgagcattaacaaatatttctaagagttctcttagggtcacttgtaaccacagtctcctaaattctagggaatgtggcattgttcagctcaagagaaaattctgagggagcccaaggccttaggtacttatgtttagctactgggactcactttgatcccagaacactgggacctttttctgagtgtctgagaagtagactttctctttctagttgtattctattattcttgctcgaaggctaaacttttcctaaactcccctcatctttgatgaaagaaaagctttcactcaaacccccattttctgtcctcagccagccacattgttacctcaagcctaattctcattattttgagtcagcaggactcaactagtttgcagctatgcattctccatactttattttacacttttgtctgattcctcgcagttttcagctcctttcaggccagacttcccctttcatttcatctgatctattttaagtgtcatttgtgcttctcctgaccaacaccttatctattccaaattagcatatataagaaagttgtttgtctaaacttggaaggtagcttcctactcccaccaaggaggactgtgaggggagtgcaaaaagggaagtttgtatttctgttccttctgctgttacctacaacctccccgtcttctgaactgggaccctcaggctttggccctggattaggtattttttctatagctcccaccagctgaggaccactgagttatttactctttatctacagtgaagatatttttgaactaaacatggtaggggcatgtggtctaaaaatgggaccaaatattaaaaatcagaatttttccttatatgctgttattcttgtaactcaactatatctttactccactttctataatctccactgtaggtagcagcggagggtgaggggatgtgttgggagtgagagtgttttgtgaaacaagtcttgcctcccttagaatgtgaagaataagttctggtttattcttttattttattttctttacccttcttctttttttctggaaagcaaaatggatttaccaaataaggtttcacaaataactgtactcggtctcccattgatctagggcccctatacaaacagccctggagttgtatggctggtgacctcctcatgctttttcttacgaagaataagtacaacctacctcactagggagtgtccagtcatgtgtttccagttttgttaaagtgtgactgaatgtgtatgtttaaagtgtacagtgtgatcatttgatatacattgtgaaatgatgatcacaatcaagctaattaacacaacaatcacctcacctagttaccgtttgtgtgtgtgtggtgggaacacttaagatctactctcttagcaaatttcaagtatacagttttattaacttagtttccattctgtacattagattcacagaacttattcatcttataactaaaagtttgtaccctttgaccagctattcctcattcctcctgtctcacacctccctttctcctttcaccgagtcattttgtgaaggctctactggccatggttaacttgtccttcctcacaggtttattttgctagccatattctctctttcagaagacatgttgattactcttttcactttctggtgatgattgtcttctgtgagatctattatgtaagactttatctcttgctaaaaggatgtataagctaaggaaagattcctggcaatagctatgtaataaagaacagggaaaaagtacaatgaaatgtattaaaaatgactttgtggaagaaatttttttgtatcacgaaatgcatagttacatagttgccacagaaactttccagatttttaaattattgtctatattcatgagaggtaaccatttgtatagttatctattgctgcataacgcatcaccccaaaactcattgcttaaaacaacaataataatttattatctctcatggtctctgtgggttatgaatttgggaatggctaggttggatgattcctgctggaggtctctaatggggtcatgcattaggccattcttgcattgctatgaagaattatctaagactgggcaatttataaagaaaagaggtttgattggctcatgattctactggctgtacaggaagcgtggttctgggatttgcttctggtgagggcctcaggatgcttccaataatggcagaaggtaaagggagaacaattgcatcacatggcaaaagtgggaacaaaagagaggtagaggtgtcaggctcttttaaacaaccatatctcacctgaactgagtgggaactcacttgtaaccaaggagatggtgctaaaccattcatgagggatctgtccccatgatccagtcacctcccaccaggccccacctccaacattgggaatagaatttcaacatgagatttgggagaggacacacttccaaaccatatcaggttgcaatctaatgttggctggggctgcagtcatctgaaggcttgtttggggctggaagacctgtttcctagtgactcaataacatggctgcaagttggaactgactgtaggtgatgagactcagttcctctccttgtgggcttctacataggtcttctgtaatatccttatagcctggcaactgatttttcccaaaacaagcaatccaggagaccaagatggaagctacaatgtcttttttggcctatacttggaagtcacacatcatcactactgctgtgttctattggtcatgcagggccaagcctgattcattgtgggaggagactatccaaagtcaagaataccagaaggtgtgcatcattggggaccatcttggaagctggctatcacaccatccatatgaatgagaaataaaccttctgagtatctgataataataataataacaacaacaataacagaagctcctacttttctgtcttaataatttctatatagaaactcctagtgtaatttctgggctggcacgcactcctggttctcttctttcctccttgcctttattttgtctatcactttcatggaactctttcttcagtctgcactttcaacatgtttccttagtggcttatctttagttctttattctcactgtacatgctttacctgggtgacattaagggtgctgtattagtcagggttctcttagagggacagaactaacgggtatgtaatatatatattactgtatacatatataatgtattatatataatgtaatacattatgtatataatataatataatgtaatatatataggggagtttttaaaaatttaattattattattattttttttttgagacagtctcactccgtggcccaggctggagtgcaatggcacaatctcggctcactgcaacctctgcttcccgggttcaagcgattctccttgcctcagcctcccaagtagctgggactacaggtgcccatcaccacacccagctaatttttgtatttttagtagaaatgggttttcaccatgttgtccaggctgttcctgagctcctgacctc

SEQ ID NO: 139177 - DNA, 1055 bp, Homo sapiens
acctccctcagaaatttggcagtaatgatctcttctcattcatcatgatacttcccaggctttggagattctgataattgtgtgaagttctgaaactactcttcaaaacattttaccagtgactgtagagaagctaatgagaaacctgtgaatttgctgggtttgaacagtaaagtttgaatttttctttttcatcttaaactgtaaggaagagctcagctagctttatttaccaaaaaaaaaaaaaaaaaaacaaaacccaaaaaacaaacaaaaaaaataccccacaaagtcatatcgtaaagatgaacatatctaatgaacagaattttagtatcttgggccttaaagttataatctcatggcttaaagtgaaggttattgatttcatccatcataatattttgcataataatccagactttaaatgaaagaaatagagaattaggtaagttctgatcagtgaactactgataaggtaacagtttctttaaacccagaagatggctgtagttcaactcattaaacattagcactcaggcagtttccttggagtcagagggatccagagatgagtcagccatgatctctgccctcaaaggacttcttgtctgataggaaggagaagcccaataataatctaaagttgaatatgttgaatgtggttaagagaggtaaagacagccctctggaatttaggcttggtagagattacagttgagttggggcagggagatcaggtgaggactggaccaaaggatcaggtgacagttaagtgggtcctgtctgcagcaaggatcaggcaggctgggcacaggaaatgagatttttctgttactttattaccaggtggaaaagatttgaaagtggtcgaagggaagcttaccaaaaaaacataaataaataaataaaaggaggctgatgaaatagaaatggttacctcttcagctgaatactgatattatggtgaattatggacacattattgttacaccttgacaggtcagtatgggtgtacctccatagtctataaaatttgtatttgaatttcagag

SEQ ID NO: 139178 - DNA, 4003 bp, Homo sapiens
catgatcgtgcctctgctctccagcctgggtgacaaaacaggaccctgtctcaacaaagaaaagacaagagaagagaagagaagagaaaaagaacatctggaatatccaccaaaattaaaaggaaaagtaaaactacctgtagctactccatcaagtaataattactgttaacattctgatatatttccttttagtattttttcctatgcattcacaaagaaaaatgttttattaaaatgtgattatgctgtatatatatagttctatacttgctattttcacttaatatggcatcatgagtatttcaccatatcattatatatagttaaaaacattatcttgaatggttgcatagaattcacttgtgtggatataccataatttcttatggacgcaccatagtttatttcttattttcactagcagtgtataagaggacctgtgtcactacattctcattgtcattgcattttaacttcttctgtctctgccaatttgctagaagaatgatggaatctcattgtttgaactttcatttctttgctaatgagattgaacttttttttggaacaactcagtttttgacatgtggctttcaacgcatactgaatgcacaacttctagtcaaaaccacatatacatgtataggactcatggctccagttgtgacagaacaatgattgccttgctaatatattttatatagcactgggctcagtgccacagccgctaaataaatcataagctccttgacaaccaggcccatatcttaatcatttctgcatcccccataacccccagcctattgcctaacacagtgtaagctttaataaatatttgttaaatggatatggaggtggagcttttgtgagggtcaatgttaagttgctgaaatagcttttgaaatctcttcatgtgaaaaaagaatccctggagtcaaaatttaaaaccattgctcaggcttcaacctatcatctcatatgaccaggaacaatgaagaaacagatctttccataaaagggaacttctttttgccaaaggatcctttttctagccatggtatcaaatccacaaacacagcaccattatgataggggagagtcaaaagtaaagctactagaaatgagcaaatggctacaaaggaaaatgaatggatgagaagaaatatgggggaaaaaagaaaaaaatatgccatctagagctatttttccttcacttttctacttggtaaatagagcaagaaagctgcaaagactagtggaaaaatttttggataaggaaactgaggcttaaagaggtgaactgacttgtctaaggttatgtagcttctataagagcatagctaggactgagaggagtgtctttttcaatgagatcctactcctatcccctacacctcacagcagtgcatcaaagcagtttggatttctccattctccttgccagctctatactttaaatatctatctcttcttgcacttcttacactctcttcttgcacttcttatgctctactacaattatttgttttcatttttgcctccctcaatagattctgttcttcaagggcaggaactgagtcctgatctctataacttcaatatctagcataacgcttgattcatctagatgcttaatgttagttcatgaaagatatcatgttaattaccaaagctgtgttgttatgttttggcattcaaacctgagcatctggaaatctttctagttgaataaatttgccaagtatatagtaactcccaataatttctgctaattgttagggttttgccataagtaaggctgtacttggagaggagagaaatgactactgtagagaaatgacaacaggctagggaagaggaatatgagggaaacagagcagattagggaaaactgaggagactagaggagggagatactggatagaagaagaagatgttatgggaaattagccattagtgttaaccatatgcttttgtggtacgtgttctcatatacatacatatctcacagtaattctttgtgtagtatcacacccactttacagatgggacaactgagacatgttaactgatttgcccagagtcacacagttaggaagtggcagagatgaaatctaaattcatgtctgtctaatttcaaaacctgtatttttccttgtgtctttctaatactccatgctgcctctcactggcattgaaaggaataaaacagaagaaagcttttttttttttttttttttttttggaatttaaaaattgcacgtcaaattaaccaaatattaatgatataccatgtcttcttttgaaactttctcctaaatttccctgatagttctttagcctactttatttatgtaacattacctgtgaagtactctaccagatagggtcaagtagaagttataggtggtaatggtactaatgaaagagaacagcagtatttgaaagcaccaaagttatacatacattatcttgcctcatcattgaggggataaaatgccagcgtgtgtgctgctgttggaagcctggccaccttcagttcacctcctgcacttttgccactctcttggctttactgaacttcccacaagctccatgattcccacttcagcatgctgcttatcttgtgattggcaaaattcctattttttagtttcccacaagcaattggcagctcattagaagtgattagttgctttccaggattttaaacgtttagaatgtatttagttccccaagaatgaggaaatcttgactggatcttcaaagaatcccattttagctgcgtgttttcaaaagtaaagttaatatccatagcagtttattgtacctagttgtctaaacaatgttccagatccaataaagattttctaattattcccatcctcctttctggaggcagcctggtaccagctttgagaggaggcaggaagatgggtctgtctcacccctctacccctcaaaggccttatgaagttacaaattccacctgttctggagaggaactcagactgaataaaatattaggtcatttggtagaatatcttgacttggttttgccttaatgcattttatcattattctacaagaatctaaagctttcttagaaaagtttgcaaaatacagttaggttgaccatgtaagatctaagacctggaagggatatatataagccgtttaattcgtccctctgcttaggtacatcaatacctaaatcataaatgagcgatggtttttatccatttgaaaatatttctaaatgcaggtattttgtgtcttcttagtcagtagtatgttctggtgtttaagtctctggcatggtcaagaagttctccctaatgtttgaattcttttctagctgtgcttttatgcccaattgatatgagcaatttagaaatcctagggagatgcatgacattgaaatttcctgaaaagtactcagagttggattacagtagaaacaatgaagaatcgcgccagcctgcagagatataagcagaatatgaaaatgtatagctgatttcatcatggatttgcatgcaaataaggatgaagcagtctatgggagggggaaaacaacaggtagagaaagtagaacttatactaatgccattggaaatgaatcagtagaggagaaaatttttagggcaataatgggaaataattggaagagatagggcccacttcagagagatttgaggggatagatttttaaatagaaagaacaagattgattgtataacccatgcaatctgcactataacaagtatattgggaagtagggaagggaaatagatacaggaaaatactgactggtttatcaggagggtaagatggtggtatagtacctagagagctaagtaatccactgattttgaagcacaagtaaagaacaactctggtgaaagtgtaattggaatgatgtgcctttataaggccttggcacaatgagaagttacatttgagaagtatccattttgagtgggtattcatgtaggcc

SEQ ID NO: 139179 - DNA, 1761 bp, Homo sapiens
ttgctggcttggggtgtgtgctcctcagctgtcctgtgtcattccaattatattgtcatatggtgagatttgtgcctgatgtcattgtaggcaaggatatagtagaggcagctcatttgtatgttggtgcttcccagttctccatttgttgagatgcttttatcattcagacctttgagacaatccaacctgcttccttcatcttaaaggtgaggaaatgggcccagaaagggaatgtgatttaccccaaatcatactatgtgttggtgatgggaccaagatgaaatccagctccccaggcctctggcagggactcctgaactcatagctttgggcactgacctcatggggtgaaagggaagattatatttctatttgaatgttttctaacacatgaaatttatataggtagttatacctagcaggagccaaagaacaataattttaaaatagttctataaacttcatatccaagttaattaaacaaacttttattgatttaagagaaactggttaatcaagttcatgattcattaataatcaatttaagttgatatgaaaatatttgtggtatgagcaaaagatggaggaaaaaggatccagagaacaggaagaataggtcagaagaagggggatttagagagaagtgttacttgtgtggtggagaggggtagatagaaatttgggagtcgtctgtagagagatgataagaaaagaaatgagaatgggtgagattgctggggataatctaacagaaacattacatggtagataattaaaatacccattaccacttgctgtatatctttctttcctgagttcaaagcctttcaccaatgctatcacatttaccatcacagtatccattagaagcacgcagtaattattgattccctaaagcacacacgagttaagtgacctgacccaaaccataaggagtggagatagggcctaaaagtattgcaaagctctgtggcagtacaacagactcatttaaataatatatgcttgttcaccttagtctttgctacttcatgtgatagtccagttttgcttaatcaagttttagtttgtagctataaagttagtacatgtcactctacaaaattgtaaaaatatggaaaccataacataaaactcataccataatcctactatttgaggaaaattgctattaacattttagtgtagattcctttttctatgcattttaatacctttttataattacaaagatacacactattgtagcagagaatgtggaaaattcaaaaatatattaaaaagagcagtaaaatcacctgtaattttgattacaggtgattttgattacatctagatgcttaatgttagttcattcacctgtgattttactgttcttttaaatgtttttatttttttttaaattttggtcaacaggtatatgaaaggtactcaacatcactaatcattagggaaatgcaaataaaagtcactgagataccacctcatacctggttagggtaactatgataaaaaagacaagagataacaagtgttgacaagggtatagaggaagagaaactcttgtatactgttggtgggaatataaattagtacatccattatggaaaacagtatggagattccacaaaaaactgaagatagaattaccatatgactcagcagtcgctcttctgtgtatatgcccaaaggaaatgaaatcagaaggttgaagagatatctgcactctcatgttcattgaaatattatcacaatagc

SEQ ID NO: 139180 - DNA, 1059 bp, Homo sapiens
acagagtctcactctgtcgcccaggctggagtgcagtggcatgatctcggctcactgcaagctccgcttcccgggttcacgccattctcctgcctcagcctcccgaatagctgggactacaggcggctgccaccatgcccggctaattttttgtatttttagtagagacggggtttcaccatgttagccaggatggtctcgatctcctgacctcgtgatccacccgcctcggcctcccaaagtgctgggattacaggcgtgagccaccgcgcctggccagacagttatttttctaagaagtattcataggacaaaatgttacatggaactttcttttgaaaatatgattccccaccccccaacccaaaccaaatgagactcattctggtttctgtcttctaaaatgatatccttttcattaagatgaatctggtcccaatccaaagtgcaatgatgactgacagtagtgtctagtataattggagcagtgatggaggtggggcaggtaaatgcaagagtggcagaaattaatctgcagtcagaaattaatctgaccccagactaatgctggggcaggagagagagatatatgagagtgccagaatatggtagatatggtagatgccagggcagggtgaaggcatccaggtgggagctgaaatccagccaggatactgctagacaagctgtttttcttattactccagccacagaaagtacctttgacaatccctccatctcttttctagctggatggcccagagtggggaccttttagcaccagcggggacgccttttcctaatttgcacaatagtgccctatgttttagtagtgaccttaagggtggttataggagaaggtggaaagacaagagtgtctatttgatgtaagtgtagggaatattagtgatagttcggaaatttctccagataatggcaagacactcctttagcagcccccctttcctgagtttcccattgttccacttattaaactctgacatatgtcatgccctgtgtacctggatatccattcatcctgatcacaacctgatctcc

SEQ ID NO: 139181 - DNA, 1317 bp, Homo sapiens
aatcaattttttttgagacaggatctcactttgtcacccaggctggagttcagtggcatgaccactgcagattcaacctcccaggctcaagcaatcctttcacctcagcctcccaagtagctggaactacaggcacatatcaccatgcctggctaatttttctattttttgtagagacagagttttgccatgttgtccaggctggtctcgaactcctgagctcaggcgatccacctgcctcagcctctgaaagtgctaggattacaggcatgagccaccgtgcctggccaatcaattttttaaaagatgacttaccatatgtgctagaatatgatgatggttgagatactcctcaccattgattccataggaccttctacagtgaactttgtaattaacaacagatctactgtcaaagagatttgagttagaatcatagctccactctctcctagctgatcagctctagagtaatcagttcatctgtctcaggcttagtttattcatttttagaatgagaataatgatagagtcttcctcatagaaatgttattaggattaaataatataatgcattcaaagcacttagcacagagcctggacgtaagcactcattaaatgctaactgttaacaagtttttagtggtcatagtttttcactcggtgttccccgagtgctgttcagttttgttctccctcaagagggctgtgaatactttgaggaaaggatttttttttctgcctgattcccctttgtattcttaccttagcccagtgagtgtttcgaagtgggaatactgagcctcagtttcaaaatctgggggaaaaaaacggtactaataatggcacttaacagggttgttatgaggatttaaagtatttgctatgataacacatgaacgaaagcctcagtgattcacatatcctacgatgcagcggtttggatatgatttgtttggtccctgccaagtctcatgttgaaatctgatcccgtgttagagttgggcctggtgagaggtgtttgggccatggggaaggatccctcatgaacaggcttggtgctgtcctcaagataatgagtgagtttcattctgttagtttccagaactgattgctaaaaagagcgtggcaccaccctcctcctctctcgattctgctcttgccatgtgatctctcctccccttcaccttccactgtgggtggaagcagcccaagtccccttgcagaagccgatgctgataccatgcttcttgtacagcctgcagaaccactatccaaataaacctcttttcttcacaaattactcagcctttataa

SEQ ID NO: 139182 - DNA, 1741 bp, Homo sapiens
actttcaagattatcaaaatgttcattcctagttagagagagaaagatggcatcgttcttcaaaatgtttctgttactatgcttaaagaaaatatttttttccttagagcattagttggagtattgagactcagatttatggctattctattgacaaggggttattgcaaagatgttttatttgctgtttctaggggcttatcaaaaataattgactagctgtcattttctacatgagaccaattactattgacccagctttgcttattgttttcattaatgtctaacaaagaatgaaaatgttgttgaatgttcttagaactgacaagagaaaagcagtgctaagaagtgagtatgtatctcttggccttcccagtgctgctaagcagagccaaagctcgatgccaggatgttgtgtgagcaacggcttctacagtatgcaaactcaaaactaccctacgtgatgtttgggagaatggaggatatggagaggtagcagcctgctatgtgcagttgtacaggttgtgctctgcacattcacattgtggttcatgtgaaaggcattctctagagttgtgcaaggcacgaccatatgtggaagcctgggaggcagtagaataacttctgtgtcttctgtgataagtgtagtcagtattattattattattattattattattttgagatggagtcttgctctgttgcccaggctggagtgcagtggtgcgatctcggctcactgcaacctctgcctcctaggttcaagcgattctcccacctcagcctgccgaatagctgggactacaggtgcccatcaccacgcccagctgattttttttttttttttgtatttttagtagagacggggtttcaccatattggccaggctggtctcaaactcctgaccgtgtgatctgcccgccttggcctcccaaagtgctgggattacaggcgtgagccaccacacccggccactatttttttttttttaaaggaagcaatacagccatgagatggctatcatttatgacttggcaccttataaaggtaaaggtggcctgttttacctttgttatgtggtctattggctgaacattaaccacatatttacgcatctttctgttggcatgtaggaatgattgcatttctgtagtgggaggagcctggtaaatgatttttttggcatatgcagattagacagaaagacaggtatgacttagtaaataagtgttccattcttcaagagtagagtagacagtaacattcctcaattattgagtggcaaaaaaaaaaaatcccctttttctaaaataccaagattgtactcaataaagaggaaatggaaatgcaagcaccataatcacatgcaaaactaatttatgattttggtttaaggagcttatattaggctgttcttgcattgctataaagaagtactcaagactgtgtaatttatttaagaaaagaggtttgtttggctcgtatttctacaggctgtacaggaagcattgtgctagcatctgcttctggggaggcctcaggaagtttacagtcatggtggaaggtgaagagggagcaggcacatcacatggccagagcaggagcaagagagagggagaggaggtgccacacacttttaaacagccagatctcgtgagaactcagtatcaactaggacagcaccaagccattgagggatgtgtcctcaaaacccaaacgcctcccaccagggcctccaaca

SEQ ID NO: 139183 - DNA, 1051 bp, Homo sapiens
agtttccctcaatttaagtatcattttctttctctccttattgctcacatagaggaaggcagaaaaatagcttcagatgattgtgtctggaaataccagatattgtggtctatttttatttcaatttttcatatttaaattgtctgtataccatagtaatgtcagtagctggctactgcttaaaactagaaatttacatgacaagtaatagttactttaaagagctacttaagctgtttgaaaatgcctccagacatcgctgtagctttgtctactaaaaccagtgaggcccagcattcttggtcgacatgaagtggcttggttgaacttgttggtatacaatacagtgaattgcctgaccctcctaattgtgcttcagacttaatgccaaaatggtgcattaattggatgtgggcttcaggtttttgttaactatcagcttcgttgctgaccaattaccacatgtaggaaaagattagaaaatattctattttactgagataacaaaatcaaccgatttacatatacccatacattttaaagtaagcaaactttgtatagatttttgttgcagcaaccaaaatccagatggatttccccttctaacagtgtattttcctgtgtgaaatgtctcttgtcattattttcctcccgtttcatttaataagaacatacgtagctcattatgaagtaggtaccctatggagaggattgcctgtgactttccaatatgaaatcacaatattttgtttgcatctattttataaaaattgcaaaagtaatttatttggcaaaataccacctgcaatagtataaccttagttaaattgttttgttgcttatatgtaaaaaaaggactcttgttgcttcccagtaccaaaatcacacaatgtaattagttattcccttttagaaactatggttgcagtgataggcttgaatttttgatgacagagggagaaaacataaatattaaaatatctttatttttgtgtgggatacaaataaaagaacatcccacagataactgtaattgcattttattgaagga

SEQ ID NO: 139184 - DNA, 1372 bp, Homo sapiens
cgggggtatgctgggccaaaaggcaactttttgggcacaaaaacaggaatgcctgtccccattcagggccacaggtcttcaggcttgaagatggggcctttgccagggaaccggcctctccgacccagtatttccctgtctcctttttgtgtcaatattatggggatagagaggatttttgagatagaagcctgccctccagcagctgcatatctaggtgggatgaatagatgccaaagactgctctgcttgtgattccataggccccattggattctgctagcggatgacttgttcatgtgtctttctcatttccccagttgcaattttaggaaatactctctttgctctgaaaattgttatcaattcttcttcagccatttattttctgggactagtaacccaataattcaatgtctagttcagtgaagagtcattgctagacctgatagtgatggtaacaaacttcttcctgggagccactcagccatttcaagacacaagggaatcttagaataaacaatttttttttttttgagacagagtctggctctgtcacccaggctggagtgcagtggcatgatctcggctcactgcaaccttcgccacctgggttcaagtgattctcctgcctcagcctcccaagtagctgggattacaggcgtgcaccaccatgcccagctaatttttgtatttttaatagagacagggtttcaccatgttggccaggctggtctcgaactcctgacctcaaatgacccacctgcctcagcctcccaaagtgctgggattacaggtgtgagccactgcacttggctgtaaatgatcttattcaggtgctaaatggtgggctaggagcctgagagagaataattggttcttttctctgtacggttggtcccatagggccacttccatctcttatttacctatgccttttttctagtcttgatgattgactagagaagtttggggggcattgcttgatctcttccaaaaaaaaagaaaaaagccagaagttctttgaaaatgactttagttttttcttaaagaagcataaaatatcaggttagttgggatagtttttaagcagggaagctgtatttcctgtatttgctaagaatattatgaatgagttaacatgttactgtaggttaagataatctagaaatgtatctggaaaatctatttcaattaccttctgggtgcttttagcaaaaataataaatttcaaagaattaagagagtcataaaaagaagtgttatgaggggagtatacctcatttttcaccttcaaaattaaatattcactgtggaattatgtactgccagggtcactgcattgcttataggcattaatagctgccatagg

SEQ ID NO: 139185 - DNA, 1366 bp, Homo sapiens
gcagaggcgtgatctcggctcactgcaagctctgcctcctgggttcatgccattctcctgcctcagcctcccaagtagctgggactacaggcgcccaccaccgcgcccggctaattttttttgtatttttagtagagacggggtttcaccgtgttagccaggatggtctctgtcttgatctcctgacctcgtgatgtgccggcctcggcctcccaaagtgctgggattacaggtgtaagccaccatgcccggccacccagtactcttagaagcaaaataaaaaaagttaccctcctttcccatccttggaaatttcatgttactattctgtgctcattgttaaagcaggctatgccactcaagcttgaaatatgttcgtgttgccatggtttgtgtcagtagtccttcctcatcatgcttatagttgcttgtgctcactgaaccccaacaggtgtgtgacttaatgtagatgctaaagaaagatacaggaaagtatctgttagcactagattctgggtgcgctttcggtgaagttgtacttgtgatatttgctattacttactagggttgattttgcaagtattatgtccaaaacccctgtgttcttcctaggcgccatgtatctgatctaagatgactctttttgtgagcaacataagaagatattaaatgtagtctatattttctgaagtgtagagtgctgtcatgtttacctctagagacacccagtttcctatggtaacttttcctctacaagttttaagtgcatgaaagaaaaggatgggaacaaggaaagaaagaaaagtaggtactgctgaatactggaggaagacttgagctcagggaaagaaaaaggaatatcaggcctaatttcatcttcattccactgaaaatctgtgagagctgtttctagagactttttcagtttcttaccacttctctctgtgtgttattaaaccttgtctgttcccttttagttattagccctaaaaccccttacaaaacctcaaaagggtttctgggcttaagtagatacagatggggaggaggggaaactatatagctgtgttccacttggcagtggcccaagagaaagcagagtcaaagaataagtgttatcagcagaggaagggagggaggaggcccgcccattgaggagaaagtgagggttgacttgagggactctggaaagggcccaggggaggatacccttttcaaatggcacattatcatgaggtcttatccttttcttctggatggaagtcatcctcccttgctctagactttacctgtacccctttaaatgagcctattacttagtattatcttgtatttgttgttgttatcttgtattttagcagctaat

SEQ ID NO: 139186 - DNA, 2005 bp, Homo sapiens
agactttgaagccagtagacaaatgttcagtctaagtaattgtgaaaacttttagaaacaatatctgtatgttccttccttcctcctttcctgtcatctctgttttccctccatccccatccctctcaaggttccaccaaaggcccaaagcaatatgggggtgagaaaaagatggttgggtggaaggaaaaatcattttattatttgagttgctttctcccttacccaagctccagcactgtttgttgcatgaacagtttgagctccacaggaccgtaagttacacttacaaaaacaggaatgtgtctttaaataatattaaatgttttagtgacatcaagatgcttacagggctagtcaggcaggtaagcatataaccagctttcttctacaagaagttttatttgcatcttttaacatccccttgacatttatataccaaggtagaaagcccgaacctcagagaaaaaaaaaatacatggggtttatgagtacttgaaataaaaaattgaactttttcttcctgtcatgttccttaaaatcctttgaggaaaaatgttgttatgatgtgcccaaagacatttaacataaaaggtaactggtgctggatgtggtggtgcatgcctatagtcctagctacttgggaggctgaggtgggaggatcgcttgagcccaggagttcaaggctgcagtgagctatgattgtgccactctactccagcttgagtgacagagggacaccctatctcttaaaaaggtggggagggtggctgtggttacctgccatcatctttaagtttcttgggcattaagcaagctggaagccagtttaatagctatccttatgtcttatgtcttacttttcatccttgtggatccctttggaaggaactaaatgtgttggcaccattttcactatcatatagttttctttctgaatgtgaggcggtaggattctacttatcatgtactgtacagttgcactacttgaggatgatgaacttccactatatatcacctaatcacttcttccatcctactttgtatgtggtttaaagtgtatcatctcttgcctggtatttttaaataatggcttttacatttttaaagggaaattcttttgggggtaccagtttgtggtgatggttgaaaatatctgtctagcatcatttgtaggaaaaggatagtataatgaacaaatatttattgtgtacctgctatgtgagatacattatgtaaagcactgagcatgatgtctctcacatagaaggtaaggcatgaagatcttaactagggctgtagcagtggagatagggaaaagctagaggtcgatgtaagaaacattgaggaaaagagaactgatagaatttgtgactatatggatggggatgagcaagaggaaggaaggaaatattttttactttcagagctgttagtaactgggaaggagcagagtgatgtcaggagtagaaataaggaagttggttgaagcaataaggattgtgggatgatcactacaagaggcaaaatgaattggattttggtcatgttgagtttgtaatacaggtgacctgcttacggggagctgtccaagagggagtcagaaatacaggcctacagctctggagagagattgagacttatagagaaatccaggaattatccacataactcatcataatggaaatcatgaaagcaggaaaatttaccaaagaagatattttagaaaaaagacccagcaaagaaatagagcatgagaatgaaagccttgagggtatgttcatgtggaaggcagagagattgaagaagaagcagtgtaaaatactccataggggtggaaaaggatggaggttagacgtgaccatcccatttagcaactctaaaagtcattggtgacatttgagtaccaaatttcattagagagatgggtatgaaagtcacattgattggagttgaggaagaggatgttgattcctcttttaatatatttgggggtagagtggag

SEQ ID NO: 139187 - DNA, 1090 bp, Homo sapiens
tatatttaaaccagctgtttcccataccactacccattttaatctgttttaagcttatctttgtttagttttaagaagtccttatctttactgtattaggatttggtgaataaattcagttcaccctgccaatatccattcttattcggcaaactgattgcatcccttttcaaacttcctctgtttaacctggagtgtctgagctctgtaatatgcccttatatagatagtatttccacccccaagaagataacagctaactttctcaagctttgttctgtctcatcacccatggggcctagaatagtatgttgtaacccaggaggaaaagtaccttgcttaaactcctggacaccactttgtttatttcaataatttgtggattatttacatctcagcaacattcttggggcttgggggatgtggaatatatatattgggactggcatagtactctgcatttttcattggctggcctgcctggaaacctgcagagttgtctgtgataatcgttcattggcaaaagaatgccgaaggataatgtttatgcctggcaccatttttaattcatttgccttgagtttaacttttgtagtaaacttctgggatggcagccttctagggcccattaaccagagtttagaagactgtgtggtagaggtcttagccgtctgttacctgtacagttcctgccagttagatgactttcactagggctactttatgagggtataaaaacttcttagtaaattcggccttttattaggcactgcatagcccctatttcaggaaaacggtctgtaccaggaaatataagggaaaggaaagacttttaagctttctttgtaggtgccttttaaacatgttagccatcttggcacttgccactaagtgagggaggcagccatcattcagaagagatggttttaacatctgtggtttggggacacaaaatgagacagcatagtaataaatgtcctaaccccaggtcatttaggtcagacatgtttcttctagcattggtgctggtcctgcctgagactgcaggaatcagtggcatcaggagcttcttcagcccatatagaaaaat

SEQ ID NO: 139188 - DNA, 1091 bp, Homo sapiens
cttgacacattatcttgttttctctttttctgtcttggccaccaccttcatctgtcatgttcttttaaaagcaagaccctaaaactttaccttctaaatcaatattctaaggtgaattttgtgatgctttgaattaatggcagagaaccagaagtataggcaattgcaaatggaagatgatgaataactcatttatatgtgagttggaaagcctgtttatatttacatttgactatgggtgagtctgttttttagaaattcactttcaaactaaataatgaagtcatacataaaggtctgacttgagctgctgagaggctggcccaatttcctgcaacctgctgcatgctggggagagtaaaaacatcgtctgttgtccaacctattactgacatagcatcatcctaagtgctactgacatgtgtaactgaaatattttattctgtggcttacagctgtttcttcttagcttgtcctcaataaatatggaagggatcatcatggtcaaaggacttaaaaaggaaaagtaggatggttgtgtacaggaaactatagcaaaaatatatatatgtgcataaaatggaaggattggggatcagtgacatagacaaatctttaaagattacatgaaataaaggaggtgaagtaaaaccaagataacatcacagttaatgctaaagaaattattggtcaaaccaaacagaaaagttcacacaaaatgagaaaaatactttatctgagataaagaaatgagatggtttatgcatttccaaaatggaactgcaaaatgtttgggagaccaggtggctaaagaacacggaatgggagaattgtaaagttaaagcaggtgagaataatcttttcccttaactgacttagacttacaagaaggaagataggatttggtgattttttttggtgcaagttggatcccagataaaccttgggagctcttgggaactcttcgtgggtaccataattagaactgtattgtttctgtgatttccagtaatctactcctgaagagcagaatatggtttgaaattgttcccattcaataagccatcatagatttaaatcttatcatcaca

SEQ ID NO: 139189 - DNA, 2823 bp, Homo sapiens
caaagataacagtggttcaatggttaatatgttggtgtatttctctccagtctttttttctgtgtgtgtttgtgtatgtattatagtctgcattatgtaatatgtactgctttgaaactcgcttttcccactatttactgtcaacactatttattgtgaacattctagttcagtaaattttttataaaacctatttttttatggctgtatagccttcgttacatgaatatagagtaatttgttttgagttaatcatcttagattgtttctgacttttgcaattagagctcatgctataattaacattctggtgcataaatatttgggtgcatttctgattcttttattagaataaattcttagaatttcagcactactaggccacagaaacatgtataaagttgtaaaaattctttgatgcatttccaaattgcactttgagaagtgtttctgtttagtcccaatagcagggtgtgagaagagaatggttggcattatccttgttttatagatgcaagggtttaggtgtagagagattcaagacttgtctaaggtcacatgatgatattacttatcctttggttttctgagccagttctatattctttccactttaccactgttgtagtaaaacttggtgacagatctatagtgatttaactgtgagggaaaacttaatgcaaccatggccttaaaataaatttacctctattattattattacaaactctaatgtgtagaatttgatatatagtgaggactcacttcccaaaggcattcttttatatcttcaatatgttttctgactcacatctaaaatatccactatagaggttatgtttaactgagaaataatagcctaaagtgattttgttgtagctttttggtcaccaaatctggtttacagtattattccttattaagtaatagtctttccagttcagcatcaagacattgaaaagattagttctgtcaggattaaattgctctcaaaccatcataagtaacccttaatgtctacaaaatggactgaaacttttgttgactctcattttttggaagaagatgaaggtaaaaatatagttttaatgtcaagactccagaatgagatgggatataacaattaagggtgatttcctccaatgaaacataatcaaaccaagtgtgggaagtaaaacaaacatctaccccatgtccccaaacaaaaacaaaacaatactgtcaaaaggactaaccacattagtagttttcatttctttcacatagcacttacttaattcttagaataactgggcatcttggccttttttgtctgaggatagcccattcacaacttccaggtcaccagggagccctgtctggactctgctaaaggcctcttgctctttgccttagagaataaatgtgataacattgttttgcccttgattcccaggtagataggacataaattggaattaaaacattcagattctgaaagccaagataacactttatcttatttgaggctgtgctttctttagtatcaccttaccctgggaaccctcctaagtgtttaataggtaccattacttctggggttaggagtgcattgctggaagccttcttattgtatcctgatatgcctttgggaaaaagaaagcccttcaagtgttaacagcgtccgtattctgttttaggccaatgccattgttatttcaaatcatattatcttaatgaaataggagtctatgtaatatgaattttgttgtgtttgacaaaaattaaagttgcataagaattatgatcatgttacagtaattgcctaaaatgtggtgttaaagttcctcacttcagttgttttttgttgattgaacaacctttgggttagatggtaaatctcaatggctttagtaataaagatctaaatagtctaataatatttctaaatgaatcagtttttcagtgtttcaggaaatgacaattttttttaatcaaggcacttatactgaaatcaaatagtgataatagtgtaagttcttattgcttaactgttttcagacagcagggactatattttgaatgagtgcatctgctgaaattagattctcaagaatgttcatgttatggtaggcatcttgaaacagatgattgatgggttccatcaatccacaggtatttattgagcatctacagagtaccatgcactatgttaggtactgtggggctaatatataagatccaatttctactcacaagggagtgtataggctgagtgacaaagaaaccatgaacatactatccctttttgagctgagcctggatggtggggaggctattgataaaagaatatgagagactgggatatccattgtaagtagatataatagtctaagcaaaatcttaaagacaggaaaaatgagcttggtgaatgccaaaaaactatttgagctggaataaaaagattccttaaaggaaatagtatagtggaagagaaagttgaaaaggcaggcgggggatacaatactctcatttccatttgccagctgtgttctagggctgtctgcctagaactaaataaatatgaataaatttaaaaatgtgtccaatttaaagcaacacccaagaaacaaaatctcaaattaatttgtacaacatgtggcattgtaaaataacccttcagggtgtccaatttaaactgcctcctctttcgtctctgtgtatatcatgtgggccacccagtgatgccagttggaaatgagacactaagattagaaaattttgccagagtgattcagatcttgttggatcaagctaaccagctttgtgatttcaaactcacta

SEQ ID NO: 139190 - DNA, 2150 bp, Homo sapiens
acacacacacaaactgtagaaaatatctggtggccatttaaatagaaatcaagccaaaattgtgtgtttttcattttagggggaaagaacaatgatacatctaaacggttatttctaaagagcatatccatggtccagtgtctttcaggagcaaaaataggcaaattcaagcaggacctaagggccatttgctcagcagcacctagaaacaattttagtcagggtccagatttaaagagtttctactcaggtcaagctagagattaggaaaggtggcagatgaaaatcgactcagggtctggcactggttacaaaaggaagcaggtcactaggttgtgtttatagaggaaagagaatggattgcaagattgttatcgctggaatcattgtgggggaggggaagaccctcatttgaagccttggtcctccgactaaaggagcccagagtgctttaaggactcacacataattagccatacattccacaggaagaagtcctgcctctggctacatccctctgccttgaagcaacggaaaaggagggataagggtgggagcaggaggcacggcgcgaagggcccttctggccttctgtgaagacctttctaaagcatctccagattttctagcctgtttcatcctttatattgaaaaccagcagatctttagaagcctcagctagcaacttggggaagagttttttactagtatgtcagtaaacagtggcatgtgaagtttgtgcagttctggtttgttggagctcagtgatctccttgctctttgacaaaaatgttttgtgctgctttagagtttacagcatattgtccctgaccctagagggagggaaaaaaaggacttagttcttcacttcaccctttaagaattcaggtaacagagtgacaaataaaaagcatgttttcaccaaccaaaagtgtggggtgtagttcaccaaggtgaaacatacatgatgatcaacatgaagacaaactgctaagtagttttcattagtatccaattagtaggtgatttggttgataaatgcgtttgctaattcattaacaattaggtaaattaaatttaatgaaaatgatttaaatttgaacataaaacgccacatgtattaatttttactttgtaaattgaaatccatttgctgcctccccccacaccccttcaaattgtgtacagtactcagtcaattagagcacgcagggtggatttttttctcatttaaagtatctctcctctctggaaatcggtcttccagtggaccatgtctgtctgtgtctctagatgagtgtcagcgacaaatggtgcatgtgcacataatactgatgaggattgtgggtacgcagtgagagcaggaaaagccctttgcaataccatgagggattcaggaaggtattttagaatttggaggggtttaaggcttcattccactgctgatattgaattgcagcatgaccaaatgattaacaaacttggctttctggaaatatctcagggcagagaggttctcaaatgattgcaaattggttaattactttaaaaagcatgttacttgctgtaaacaagtaactttgctgggtttttctaaacaactggctatgtttagaagatagcaatatagaccaattaaagatatacagagctggaaagctgatattattattattattatttggtaaatcttagaataggctttgtagtttaggatgatgttttgaagactactgcctcatcttattttaaataacttcatttcagcattatggtcagtgattttaaaagctgaaacacattcctgttgttacaatttgtgttatttttattgtctttctgacttttttcctgatctttggataaatctcattcacaatttcctggagaaacaaccagtcttttaccgtggtggatcacattatatgatttttttccttgttatcaaatagaagattgaatgagcaaagctaaataggtgggcaagacaaacatcaatgtggaatggtctttttaaaaatcagtattcaaataggcaaagtggtggttgtaatctcttcagtgtatgtagctgaaaacaataagatgctgcctctagatctttgatctttactatgaaacggtaggagagaatatgtggcccattgtgt

SEQ ID NO: 139191 - DNA, 1148 bp, Homo sapiens
atctgagttctaatctctgattagattgagactgtctgagcctcaattttctatcaataaaatggggatgataatatctatctcacagagttgattgaatgaagtaatacttcaattagataattgaatgaagattgaataaagtaatcctttccatatgtgtagcatatttcatggtatattgtaagagctcaataaaatttggtgcttttaatgggaatgcaagggaatttaaaggggaaaatggagacaattcctgttcttttttcttctcttcagtacatttcacatttccttgccttgattttttgtctaaaatggattgttaaaattgctaaaactcgaaattttaagtctagactttaagaatattttatattacaataatgaaatactgacataggagctactggtgtgttacaaaacaaaatgcacaaatacaacatttaaacccagcaaatcctgtagcaatcatgaacccatacctacttatggtcatctgatctttctattttttcttcccagtctttgtttggacttttgtaatgataaacacatatctagatcttaatagatttggcctcttcaaatataaggcctttgtggctttttctgtaattctcatcagaatactgtaagtctattaataacactccactctccctctaacttgctgcttttaatctgttgggggcttgaaaactagtttacaaaacttatttggattctattggtaatacaaaagtattcagttatgaatgaggccttgagttggggagagagaggtccccatttttgctgccgagataccttttcctttattatattctgattgttatctacattctggacacttgaggatcatatataagggaaatccaaataatattttaaagattaaatgtgtgaccctgatagcatatgaaaagaatgttcttttactcattaaaaggaactaaccagtaaactacatgtagtaatcctatgacaagtaacccagtgctgcagtgaattgttacattgggttaagcattacgaaaattaccagaaagtagctgaccaatagtgatagataggtgatatggagccaaatgtcttggagagggggatcttttgaaattaggttaaatgacatgtgtttgcaagag

SEQ ID NO: 139192 - DNA, 1479 bp, Homo sapiens
aacaaatgatgtagcaataaatgaaaggagatgtccggaggaaggtagatgtggcctcagagaagcagggctctgttctgtagtatgtgccaatgttgatcagggatatcatgatgtaaatatacacccagctctgtgtcctacaccatatgagactgatgttccttataatgaaccagagccattaaatggtttatgtttcatatacggtacttcatttacagagacaaacaaatgtaagaaatatccatacggcaatgtgtaagtattttaaaagttactttttatccagaagatctcaatctgcaaatacttaacaaggtcaggcatcatgggagatatttaaaaaacatgtgtgtgcctttgagccgtttactaagttgagaccaaacatatacaaatgggaagttgactctcagtaccaggcagtacaggccaactgcttatagacagtaactgctgtggacttcagggatggccagcttcctaggatcttaggtagtccggaaatcttttcaggttcttgagctggcctaagcaggatttaggtgggctcaacataatgccagatctgcagaaacattgtcttttgccctttgggaagttgcagtgtgtgacctgctctcataaactcctccccaaaacaggcttatgcacttagcagtaatagattgaaccatcaactccttaaagcacacctggttgataattagctcaatcacattgtgtttcggtcattacccttggatttcccaaggatgagtttaattcatctcccacattaaagtgagtgcctgcatgaccaaaactcaacagaatagaatttctgtctctattatgtcaatttaatgctgtggtaattttattgcaaaataggtatcggtttacaatttgccacccaaatatctgcacagaaattgttactgtatgctgtaaaaagatctttgatggcaaaaggctcccgtttttcctaaacagtacttcatctgaaggaagacagagggaatgagctgaaactctgatttgaggaatttggggttgataagatctaatattgcttattcagagatgacttactctggttttatagcttataaacgtattgatgatagatacaaccccttgattccaagattttacagagtttattttgtgttttaaccacactccctttgcctctgacctactgctggatgtgaagggataaactggtggtgcatatgctatattaccaaagtgggaagggagagaggcacctttattatatcggattactgccagatgcctagaatgctcaaatctactcactggttgctgtttaaaagggaaaaatacaaatctaaccacttctaggaatggtgccagatgtctgtactaaggcaacccaactccagaaggctataaaaatagcccccaagtagtaggttctgatttcccactgagctgaccaataaatccaacaaccagttaattaaaaat

SEQ ID NO: 139193 - DNA, 1048 bp, Homo sapiens
tggtggtgcgggcctgtagtcccagctactcgggaggctaaggcaggagaatcgcttgaacccgggaggtggaggttgcagtgagccgagaccgtgccactgcactgcagcctggtgtcagagcgagattctgtctcaaaaataaaataaaataaaaaatgaaataataataataataaaatccagagacaagttaaaaagaaatatgtgtatgtgtatatgtatgtgatatgaaatgagcaaagttttcacttccatgaaaaaaggtacttgtgtttgagaatgttttcaaattaaagaaaaagtttaatattaagtaaatatttggtataaaaattcacctaggttaatgtcttttaagcttttttggtctaccctcttgcaaagaaatagtattatttgatttacaattaacttctgaatcaaatgttaacatttcatatgccattaaatacatctattatagaaatggttcttttgatgaatttttatagtggcatgctgtcgtattaaccagaaatacaacattatttttattatatctgcttcagaaacagaagtggttagtttgattcaaacagaaattcctggaaaacccatgtggttttctttatgagcaatttaaggacacgttcttccaaagagagagatggacaatataaaacataatccacttttaaaaataaattctactctgtgaaaaagttccccctgagtggtgctcagtaaaccctttggtatcagtagtttgtcagctctagcacaattggagcttgtgtgggaagccatttcactcagtggtggttgctctgccaccaccaagaagccagagaacatgggctgtaactgaggagaaggataaccatgagagaagtaataagcagaccttagaaaatctttgaaatggtcctaggtaagatctcttatcctggaatcagattccccttcctccttatcattttgttggaggaacatttgagaaagaaatggattttcagttgactaggaaaatgtaaattgataaaaaaaaaaagttaaagaagatgaa

SEQ ID NO: 139194 - DNA, 1060 bp, Homo sapiens
tccaaaatatcttggcaaatatcagtacaagatgtactctttccatggtttcaacttctcttatgaaatggggttcttgattatatggttttccaaccgctcttttttctttaatacaatggttttaagaataagtactgacagttaaacatgtaaactgttggtgcttggtgaggggagacttactttgaaaagagcagatggtaccccgtggggtggagacgatgtggtaaatttgctttctttgctgtgtccataaggtcatgtacaaatggccagaaagcaaatgaaggtacccttgaagccgtttgcacttagatgtcaactttctttcaggaaagactatttttctttatttttgcttttatatagatctaggcctcaatgttgtttgttggtttctcttttttattgctacttatttagtgctgcctcatcaatgacttaggtttctctttgaagtggctgagtaccacctctatagttcagtttcttaaggactccagtgataaactagacttgaaccagtaacctagtcagcatatttttcctaaatgcctcctgccttctcatcaacattttaatctgtgagaggacacatgctagaattactattgacggggatgtattttctcctaagtggctttgttggttttgggaatctttcctctctctctgggtagctaaagactacccatcttcacagctaagtcctacctcctcctctccatttcaaactggcctcagtcccatttctgacctctcagagcactaactgccagcctgataatagttttagcactccatttcattattccttggttctttctggtgttttcctttttacttcccaatttgtttgcggggctctgagggagagaccttgtttcacagaattattcctttattaacatgaggtatatggtccagtgacccactttgttgtcacacagtttgtgaccagaggaagaaatgatgtaagaaacacagggctcccagatttcaaagaaaaaaaatgatgagagagtgaacgggttggcactaagctctctcattacgt

SEQ ID NO: 139195 - DNA, 1298 bp, Homo sapiens
ggctctgtgttcactatgatatccacaagacctagcatgggacaggatgtgtcctcagcaatggtcagagaatgagtgagtgaaatttccaattgtgagggccttacgtaaaaatgataaagaactgtagtgcctggcatctatagtcattaaattaaaaaacgaacaaggaacttagaagaggtcctaaaagtttttgaatggtgctttttgttttttggcctctctgactttcttttgacctttgatagtacttgatactagacttgcatgtctggtttaacaggaatcttaaaaagtcatctctccgaaaggagcatttttttaaaataggagaaagttctggcactagtatcaaggagatgcaaaaacaatgggataccattttttactcgaaaattagcaaaggaatatatatatatatgtaacatatataaatatataaatatctgctatcagtaaggatttagtcaaatggacacatttgtacatttctggtacaacccttttggaacagcaatttggcaatctgtattatcaagggcctaaaaatattcattgtttgatccaagaattttacttctgggaacttctcctaagaaaagtcatcctgaatacaggggggagaaaagctttatgaacggaggtgttttaggaaaacaaaaaattggaaacaatcaaaatgttccatagtagaggagtgaatggttatataaactatgatatgtccatttgatagaatgttataaagctttgtagtttgtagtttcagaagcatataaagctgtgtatatagtatgatataactgtgtgaaaacaaacaaactgaaatctgtacatagataaaattctatgaagtcttataccacaatgtgaacagtagctatttttcagtggtgagatgatcaattatttttgctttttttttcctattttctaaatttttcatttaaaagattttatattgaagacaaattttgtagtgtgccctattgtgtctagaaataaaccttgtatggttttgaatttctagttcaggtcttcaacattcctgtatatttccagtttatatgaagggacttatgaaattgtgaggaaaaaacaaacccaaacatcttcagggcaaaattgattttaattctaaagttaattgaaattaattttaattcactttaatttaaaacatatatgtaaacgtatgtcatgaacacttttaggtcaggggtatgttaaggaatctcacgaataaaagactacaactttttttttttttttgagatggagtctcactctgtcgc

SEQ ID NO: 139196 - DNA, 1844 bp, Homo sapiens
attaccaagtaatgtgcaaaacagacagacatgccccagccctcagtttcacctcatcccccagccatgaggatggagatcagggataaggtgggagtaggggtcaaaaatggaatgggtgtcatggatggggtgaatctcagagaagagatgaaggatggagtagggggtcaggcaccatctggcaagcaaagcacacatctccaggagccatatgtttcccacacttgctcatctttgaaaggccattaatcattttgggcatagtatctgctcattctctgagaattctcttatttcttgaatagtctgtgtcttaaaatttctgattccaaaccttcaagagacaagattctagagtagaggagtatgtttgcgtcatagtatggtctcatatactcagatccaggcttcactgggagtccttgagtcaatgtctgtcagttctgtcattaatattccctgtaaaaccccatgaaaaaataatatgcatctgttatttttaaaatcgtaaaacttcgatattctgatggtttgagggaataggtttattaggctctttagaggtttatcttttttttaataccaaacaaacttaaaaatacatctgtttcctgattatacatatatgaatttttcacttcctcaaggcagtttttcatatgaaattattctttaaaatttacttctgaaatatggagaatctaaaggcaaaaaggaatgcgtaatctaaaacattcatattgaagaaagtagaaagtgagagttccctgtaatttggataagggttgaggaaaaagtatcagacaggtaaatgataaacagctcctagtagtctgtttttatcatggctgcatcatgatggctgaatcagaacaaccatgccagaatgtcaaatataaatatgtcttgattttagcagaacatttgagagtcttctgtaatatccttgtgcatagattgtgaaatttgactgcataactagtaattaggcagattcacagctggttgatcagcggattcaatgtcaacctggaagaaaatgtttttagtgaagggccacaggaactgttttttggctctgcccaaatattcgtttatttaacaaataacagacacttactatatagagggcaccctactaagcactgtgaggaatacacagctgtccagatcagggcccctgccctaaagaagcagattgttgatcataattgatcacaaagacaggctttttgcattgcagatatcgcaaagctgggtggcgtagttcaatatataggatgacagactccagatttaaaatgatctcaacttgtaggaactctaggtcaaaacttacaagacgaaagttaacagtgatagatgtaaagtcttgaatttaggttaagaaaattgcatatgtacaggatatgagagatgtgacttggcagcagtttatgtaaaaagttcttggggatttagttgatcacaagtttaatatgagccaacaatgtggtgtagcttatttttttttttaagcaaaaacaattttaggctgtattagaagcatgtgtgctgctcagaccacatctggagtattatgttcaagtatagtcaccacattttatgaacattgacaaagttgaatgtatccagaagatagtgaccaggatgggtctgaaaatcatgtcatatgagaaatggttgaaagaaagaactggggataattagcttttactttaagcctcggtttagacccttcaagtcttggttaggttcccttgctatgtgctccacagtcctctgaacaagcctcatgccttccccactagaccaaggactttgttagggcagggtagggg

SEQ ID NO: 139197 - DNA, 1198 bp, Homo sapiens
aatcctcaaccattatgagagctaaatctgatagctttcacatactgcgtgctctgggctgcctagggttaagcataattctcaggatttagctgtgctttcttcaatccttaggacttgctcttcccaaacgggaccttcccataggcggggctgccctaggttctgtgtagttcgccttgcacaggcagtaatcccacccctcctgtgtagaagctagaaagcctattgaaatgtgagtgatttagcaatggtatttctatataaaggtgtgactttcaattcacttttttttgtaaagaaaattacttacaaatgatggtagttagtattcataacagctgatgcagaacacttattcacagctgatctggacataccaatgtgttgagacaatgattttgaaaaccacttccacagattattagggaaggcccaaatgcccatcagtgagggtcagctttcatttctgtgtggcatatttgcctaatgctacaaaattttaaacttgatactactcaagaatcagagaattgagaaactgagcattttttgaaggctgtgacaggatcaccaggtgacaacatctcattgagatgttgcacatgccaaaccaaatgctttacttgggctgtttttactccactagcatctctgtgactccttcattttttaaagcggaaatctaccatagctgccatcattttcaatgggaggagtacagaaggtcaaaagttcagttatatactgttcttgtgaagtcaagctacaaggaagtatagccccattgggaaatttcggttatctatttggtatgtcagtttcttctattagtaaggtatctgtgccccaaattgtagtgacactactatttaatcagacttgactaggatggcagcatagagttgaaagagaaactcagattagcctttggtgacttgtcttcttaataaggaaattagaacataccttttaaaaaaaatctgagcgcctggatatttaatcactgtcatgaaaggaagataaaaggctgatgtgttttccaggatgttaacctgtatcgagttgaacaaatgtgtaaattagtcctatatgtactgcatatagacgtgatctgttcacaactagcacagtacctagcatgtatttgaggctcaatgaaaatttgtagaatgttaatttgttactttagcaaaac

SEQ ID NO: 139198 - DNA, 1157 bp, Homo sapiens
tgctcaagaccacacagattggatggggcagagtcaggatttcaacttgggtctgtttatttccaaagactgtgtgagataaaatataatggggtcaagagacaggaggcttattttttcttaaccagttgcaaaccgagcagtctaagcagtactgggacgagaaagtacaaattgagagccagggtataggtatagggcatttatgctggtgaaacctgggaggtccttgggtgccagaggttagcccaggggctctgaatccctggggctgataatatctagcctcatagctctattgtgaggattaaatgagacaattcatgtaaagggcacatgatacaggcttgctcaataaatagtagctagtattattatttctcttatttaggaccttgcttgttatagggattagagactcccagaagcctgaggcaagacatgtttaccctagtgaatcctgtcacatcttaatagtcctcaaacattcctcaccattgaaatgccttttatttgaacctttcaaataaacaagccttaatcagctttgtgggccctaccagcttttttagaaaacctctctgcttttggggtggggcggtatttatttactcactgaaaatagggactttgtgtaatacaagggaagcaggaggtgattggtttggagttaataggcaagctttttttttttttctctttaacttgaggaggcttgattgggttatgctccctaaagactcttggagagtctgggaattttgagaacaaaagctctgcagggaggccaccaaagagagcaggctctccaccaatctttgtatgttcttaaatttttcattctatttctttcctctcttcagtccctagaatagagtggctttatcttgaagccatggagatttacgaaacaaccaaggttggcctccctttgttgagcttatgaaagccatatttagattgaggaggaatgtgtttttcccttgggaggcccctctatacctgcagccatcagaaattccatattaaaatcccacgtttaagtctttacagctaaagtctgttcttgcatgtctggaccaggtccagctgtcagactgagatattattgactttttcttctcaagtgagtggtttacatctgttggctccatttc

SEQ ID NO: 139199 - DNA, 2721 bp, Homo sapiens
ggtgggaccacaggggcaagccacctatgcttggctaatattttttttaaattttcacagagatgggatctccctgtgttacccaggctgatctcgaactccttggctcaggcaatcctcccaccttaacctcccaaagtgctgggattacaggtgtgaaccaccatgtctggccaacccagacttagccctctcttcctttacccttttaccatttttatatgtaattccttaacgtggtagctatgtgggatattatctttttaaagaatatatcttactgacatgtaacaggagattctctttgtcttttacattatttctggtaatattatgaaattcacagacaatgtttttatatttacatatacacactttaatgtcaccgaagggaaggggttgtgaaaacaagtgaaagttgaagtttagggaatcactacctactggagttggagagcaccaacttggcatgacttggatttactaaatgtaccattgcctagcactgtactcctcacaggtagtaagtaccttctcaataaacaggacgaacagctgaaatctgcagtggtgcaatggaggcaaaagggtctagaatgttcttggtggtgggaatgccatttctgctcctagttcactgtgttgggtctcatttgaattcagggaccttgcttagcacctgtgcttctggaggagagtatcctagctgggttgctggcctcttctgcagcagggactgctctgtcagaaaatgagctgccactgcagtggaggtggttctttccgcttctgtcgcccttcacagtctcagctcctctcgtatttataagactgctttaatagtcttgtcttgtaattacatctggagacaggagacagcatcttttgatagttcaagtcctaacgcatttaaattgccctcctaatgctataaaagagtcaaattatatattctggtttgtactagatagcaataaatgtcaaggtgccatccactctggtatttaactccttgctgccatctgttttggtgctcttcacatggaccatacactagtgttttcctatctcctggcacgaaaggatcaagttgggagataaatctcactattcaaaatatattaaaaggcagaggcagtttgtaaacattgctttggaaagctaggcgtagcaataaagtcaaggacaggaacctgatttagtaaaggaaacatttcactagattgtcatccactttatttttaaagctgcaataagatgtaacgataaaaaggccaatgatgcatttcagccaagtgatatgaactcttgctaaaccaattaaactgtcagtatactatggtttcagtttctataacatactaggtcaccttagaatacttagtcacgtatgactttttaccactgatgcaaaatcaatttggcaatttataatcttacatttcattatgaaagtatattattctacaagaaagctgctggaaaaatgagatatttctgaagcccattcactcctctcctgcttaagtagtcataaaagaataaaaccaatcatgttatctgatgttttgagaattctaggtagttttttatttatatgatttttttaaaaagatatacgaagtatacagtttctaaccctggatacaattttgaatgttggataaaattgtggacattaaaaagtaaaaattttgattaaagagctcactttttcacctacgtttttcaattttgtagtgtgtggacagaaagaaaactttgcttaagtatgccagagggtgggcttttttagtgtcctatatttgaggttttgagctccagctctcctcaaagggatagagcagctggttattcatatttaataccatcacatttttcaattttggtgtttggaaattctgagttatagaatgatgaaccagcagtatttgagaggtggtggggaaacagaaaaaggaagagttggagacttttattgttattactgtaattttttaaaaaaatatcttccctttttctctctaggacaaatgtaacactgctttttgaaaaaccaatgacagtcataaaacacacatgacagatccttagttttaggtgctcattagtacagtaggggacagatctgttcttatactctcatatagcaaacaagaacataattaacattgactgtatagccctttacttctgctatgagctcagtgaggattttctttaactgcattaacactggaccatttaaacttgaggttttcatctttttcagtttaagtcatggttacagagttggcaggggtatctactatattaatttagattcagttgggatcaagtatgtctaatttacatatgatacaaggactgtgggccactcaggcatttgcctgcctccattgtttcaggtaattccactgtcattggtgtatctcctatttgtatattctttctcagactccagtctgaacacatggaacacattgaacaaaaagagaaacacagagcaggaattgactaattgaaatgagactcatttcacactttctttcttgctgagaaaggtattagaacgactttctgtgtgttaagtatggagataggcatttgcacctgcactgtctcatttaaactcacaacaactctttagcgtaggtaatattattctctactttagagatgaggactgaggctcagggagattaaggaatttgccatgga

SEQ ID NO: 139200 - DNA, 1166 bp, Homo sapiens
gtaggaccagtctttcttcctcctttccctctagccttctcttaaaaaggaagaagagaaagtcattcttcttgagctacttgctgccaagtgtcattctcccagggaatccaggctgtttcagccagacttcccttttcctggctttaaggttaccaagccaagtggaagtatacaaggcccaaaggtaaagttcctgttccagatggggcagagtagccggcgactgctagagggcagcagagggccaggagcaggtctagaactgcttaatggccagatggcaaccagactactgccagagcaaaagacgtcagaggtccctcattgttgcggggagaaagaagtaggatggtccctaaccaggagagacaggcacatccaggaaatgttaacataacatggcggagacacatcacagagcaggcaactgggttggtatacagtgcaacatatcagggtaggcagggccaacgttttagtaaaagaagaaagaaagcatatttgccataaagatcaagtcagaaccagtgctacggtcaaagttcaagtcaaggttgaaaaaatcaaggctcaaaagctagaattggactgattcagctcagttatttattgagtatctttcaagaaaggcacaataatggaatagttaagatcatagactttggaatcacataggaactggggtttgaatcactgctctgccatctattagctaaatgactttttgtcaagttactcagcctgtctgcaccactttgaaatcatatgtacagatgctaaagaaatgtttgctgagcaaatcacttttatccagaggtgtttctagaaggattggggttactgattgtagctccccacctcaaagttctattccatttggtttagtacttgtttttgtcccttgtttaagatgagtggagtggctaccggtgctgccttggttcccagccagcaaggacctgattggtagtggggcatgaatagagctaagaggggcccggagaccagaggagagaaacaataccaaagtttctgggaagaattctgagatcagttaattcatgtgcaaatcaggaagacagaatattctgacttattctaaaatggtattttctctatattttcataaccttgtaatagaaatagctaagctaaaagaaaat

SEQ ID NO: 139201 - DNA, 4243 bp, Homo sapiens
tcttttctcttacagtgccaaagggaatattttaattcctgtgtttcatgtactggagcggaaccccttagggtttccagggacaacaggccagaattgcactctctgctgcctcccaatgtgcagaaagagccagtcctttccgtagttcactagggaagtgagtgtaattggtggttccagaggagtgaccctgagcagtctgcctaggaaattgtgttctccctttcagcgttccagaggtcaaggaacaccaagctccaggcccagtctggttaagctacctcaaacaaaagacctgaatcctgctgtcatattgcaggcttgaatttgccgatttgccggggcggtggcaggggggcggaggggggacggtatttttggttagatgcctcaaacactttaatttttctgttactgtcagccagctatttagtgagcacttactgtgtgtcaggcactgctgggtagtttcagacatgcacatggtagtctattcagctaaattcctcaaacattgacgtcagtctgtctatggacatgatctccgtgttatttttatttctcaattaagggctcatggaagaaatgctttgctttagattgtgtttcaattatatttcacaaataatccacatttggagtgtggtttagttcattgttttgtttttgtccctatccatataaatcactctatagaaaaacatcagattctgttttcacagaagtcagggaaataagttgtttacacatcaccatttgactcccttcacccctgtcctcattacaaacatctcagccacccaatgaagtttatttaaactcccaagccatccatgcaaataagacccctacagctacggagtttggaggaagaaaggactaggattgtctgccacttccttattctctctactgggttcagaacatttcttttcatgagttaatttactacccagaggcttggctttagttgtgtgtcctttttcagttttgtaaattagggaggtggttccatagaatcacagcatatcagagttgtcagggagctttagaaacaccatcaaatgcaaccctcatacctctgtgtgactcctctgtacaacatattttgggtgagtggtcatttggttttggagtgaaaacctcttctgatcaagaactccctcccctaagaggcagccgtttaatttttggttagctttagttgctagttcttatgtttgttggcccacaatccatctccatgtaactcttttaccataccagttgctttcatgtggcttctactcaagtaggtttctacttggttgttatccttctaaattgtggtactcggaattgcccagtgtgatgcacagggtagcaattacctcctattatctacatagtattacttttattgaggcaaccaatttaacagccactcatggttgagttagcaagtgttgtatttataatcaagcaaaattctccaaacttttatcactggccttcatttcacctttggggatttggtcctgtattgatatgacatcttactaaatttgagcccagattttagggtttcaaaattagttaacggttcttccagctttagtaatttgtaaatatgatcagtgcatcatttatgccatcacaccagtcattgattaaaaatattgagcagagaagataccttaaaatcctgattagagacttccttttcagttgacattaatctattaactagcacctttagtactgccattaaatcagtgagggaaccagccagtggtgttctttgcagtccagagcagtctctcttggacattactcttcactttgtccaaggccctcttgaaatccagaatcagtatatccactggatttctctggttttcagcccagtacccctatcataaaagggaatgaggttactctgccatgacttgttcttataaaactgtgccagtttcttttgaatgcctcttcctttttgaaatgctcacacatcttctgcttgatgacatgttctaaaatcctgttggggattgatgttagactggtgtgattattatttgtgacagccaccttcttttcctttgagacagggtctcactctgtcgccaggctggagtgcagtggtgtgatcttggctcattgcaacctctgcctcctaggctcaaatgatgacaggcacattcttttcctctttaaggaatatggaaactagatgggctttgttttcactcaccttacccacctcttctacacctctgtttccacgaatacttttctctttgtcacctttcccagaaatggactgactctctccttcccattcattcagaacactgccctcagttttcctaggtgagagctacttcgtgtggtaataggtcctaatgggctaacatgtttttgacaatgagtttctttttcctattcactttttgagcagggcctaagtcccaatgtgtgattagaatggtggtaatttgggacaccatggcaggttattaatgtagtgtggatggtgaaaacctttctctcaaataggtggctgcccatttcgacttcatatatggctttctgccaattgtgttgggggcgatttcaagtcagattgattggctaattgcttgtggtcatctggctttttagctgcttgtatagcatccgtggaggtaattagcacttccagaattgggggtgaattggagttattcatggtcatggcttttggagtgggagcaggggctgcactcgcttctagttatgagtgaatcatttttactttaaaatgattactgaggattgatgagtttctttaacaattaaaaaaatccattatggaggagtttgatatacaattgccttctagagccatttaaagtggccagttgggttctatatattgtgcgataaactcattggtaggaaatagcttcaaaagtgttgagcattttctaaaagcgactggaatttcaattgcagccctgtaccagcacacatagtggaatatttttcagccaagtgttaatgttaaagaatatataatacatttttcatttaaaaatttcttcatatgtaaatgtcatgtaaaagccactggtatctgacagtgattcccaaatttagaatcatcagaatgtcaaggtgatttctcccttttaaaaacaatgttcctgggcgatttataggacggagaacaaccaagcagaacatctcaggactgccatttcctcacgtacctggcatttgtcagtgtcaatcagtactgaaattcaacctgtggcagtaaagcaaagccgagagtcatctgcttattttgactgttcctttttcataattaaatgggagctgatgttatcatctttggaagatccagcttgagggtgacttgcttttgcaatgcaaataaacagtaggcctgggccactgccgagcctagggctgagaagccttggcccaaccagctgttgtaatccagttgttcccatgctgttcagggtggtcctccaatcctttgacctgctggctgggttgtacagccctcatcttagaggttcttccagttttccctctttctgtgttagattctcagccttgactaatggctggaatttatggaaggctagaagggaaaggcaataatttctctcctctgtcttcccagtgatcaggaagacctaccgtctatttcaggatgggggtggggtggggatttagggaggacatgttttagattattctctcttgaattcttgctttagggcttctcataaaggagggagcagtgtctgagacctaccatgtcctatctctctgatcagagcttccagcctgcctcctccacttcctgtgtttagcaagtttgatttttactttcacttgcttttctcttctcagcctgtctcctctccctgactaaatgggtccgattttgtttcctaaaaggagattaaattgctctttgctggaaaagagaaacaaacagtcgcttgggatgctgtgtgtgtgtgtgtgtgtgtacacgcgtgtatgtgttggtaaagggtgctcagatggggaatgtaaggcttcttgttggaagtctgttttcaatcctaatggctcttttcatcctaaaactgtttgggttcaaatcctggctctgcctctatgtgaccttgggcaagagccttatcctcttagaccttcatgttccccgtctttaaaatggggctaatagaagactctacctcacatagctgtagtc

SEQ ID NO: 139202 - DNA, 1051 bp, Homo sapiens
tttctacctggcttgagggaagaactattattttacatgttgcctcccatgtcctttctcaaacatagttattttgatctcacctatgttgcttttaagagggactagtttggggcctgcagaattagaagctttacccttatggttttcaactgagtataataaacatcttttaaagaaaccaaacaacaatagcaaagctatagcccagtggaggcattaagggagttgcaccatttagaaatccagctgtgtttgttctgattataatcaggctactgtctaccatttagttctcttgggaggtgatacagttaaaatcccagcatctgtagaaatagcaagtttatccactcagttatatacactgagctttctgttttaataaagagaggtggggtacaatgatcagattaaggagtatgggcaatttttaccttgagcagaaggaagcagtcctccagtgtgttttagaatcctattcattgctgacactgggagaagactgctgacaatatgggtaagctcaccttgatcttttggaggggagcctcctccaaccatttagaacagtacagtgggaggaaaacaaaacaaaacaaaaaaaacataccacagagtaggaggtggaatatagagtttatattcatggctctgctatgaagccaatagtgtaacaccaggcatgtcttttcctgatgctgagccttgtgggctagctgtcatttagggcttagtccttagtccttccagggctattgtaattgttgttaataataatcaggaataatagtgagagtttccatttattgtctactatgtgccactatgctagagggttttaatacatttatttaatccctgcagtaatcctgttaaataggtagcattgtcttcatttgatgtatgagggaaatggaagctcagagagggtaagcaacttgttcatgtcctatcttctgccccctccttcctgggtccttctttccccatagccagtggtcaccaagtcctgttggttatcactgccctggtttcagccctcagctct

SEQ ID NO: 139203 - DNA, 2216 bp, Homo sapiens
agtcatgtttaacttgcttgaaggacttgagcaagcccattaattgaggctgctaattacaatgagctttgcctattaaagcaaacctgatagaacctctacttggaaacactttattagcagtgagtttaagttactctaggtatggaaaaataataaaaggcagtgtagtgtttaagagaacggattctggaataaattgacttgggtttgaatcttgttacctgggggagtctaccaaacctctctaactcccaatttcttcatctctaaaacaataataggacctaaccttacatggtttttgtgaggaataaatgatatgatgcatataaaacttaatttagggtggtgcctagtatatagtgagtgctcaatgaatgttagcttgtgtttgttaattttggaaagtagttataaatcacacttcaccatccttccccttcatcaatttggcttagtgaagatccaggaaaacatcctatttgttgagctagttgttcctgaatttgaatgagcagccatctggggacagtaacttcataaaatggcctacctgttctatgggccaaatatgcacatggaaagagatgatcattggatctataagtcttttcagtttcccaggagggaaattcgaattgaacatgttttatgttataagcttagttgaccatgagttgatattgtgaagttattatggagcctgaaaaatatcaagagtttatatgtctgaatattttattacaacatttctaatattgttcctcttctgctgtcctgctgataaggacactttactacataaataataggtgttcgttttagaagagaagttactaagttctgataaatataaaatagaacataaaaatcacccagaatcctaacatccagagatcactgtggtgagcataggctttctcatttttttcctgcatatttcacacgtgtaggtttttttttttacaaaaataaaattgtactgtacacattcaaagcaatgctggtgataaaccaaagagtgtgcatgctctctacagttatgttcagatgtggtttaaaataggggtattaatttgtaatcacaagatggacttgaagttgaaaagctgcatacaattttatatctcagagtctgcctcaaatctatttctattgacaccaatagaaatttagcccagagaatatagcttcaattatctttgtaggtttattataattaagaatggatgcgtatgtgtgtgtctttgtgtgtgcacatgtgctgcgtgtgtcaggtggagacttttccctgttgtggagtctggtgacaagaacattagactaggagtaacaggacatggattgtggccccgatgccatcatgactcactggatgaccttgggcaatcaatttcatttctctgagctttagttttcccatatataagatgtagggttagaccagataatttctactgccccttgcagctcaaagagtctgagtgttaaaaaaaaaaaatcaaacctgtctgtctgtctgtctgcctggaagaacccgaggctctgtggatatcttcctaaggagaggaggggtgatgaatttaaacagtttctttggcgccagatagaccaaaggctgtaatttttagcctatcaggcgtttgacttttgcaagtgctaaattctccattaggaataaatgtggaagctccaggttatttattgttatttacactttccattcataactgtcagtgtcagaggctctgtcaacataactgcgtcaatcaggttagctttaatcagtttagtggtggctaagtcacaaatatatcaaatagccaatcaaaatgcaggagccctctaaagcctgactgaattatttattttgttatgatgaaaatgtctgggctttattgggttttctttgaagaacttgattcagcttgaagtctagaagataaaagatcagtgattgtctctcagatttttattctgccttccttcaaggcttttcatttttcacaagccgttgttagcacttctaagtcaaggtgagagagctgtgatatgttttatcctaggggtttaggcacgtgtggaaaacttttacctttgatttcttgtcctgtttatgtcatgtggaaggtgtgtgaccttgagctaaccacttaacctgtctgagcctcattttcttcatctatataatggggataattctaatcttacct

SEQ ID NO: 139204 - DNA, 2024 bp, Homo sapiens
cttaccgggattacttaagtgaaggagaaataaagttaactaatcttactaaaagtgtactatgtgctagacttgagtaatcttcataatggtaataacaccattaggtattattatccccattttacagatgtggaaactgggattaagagctattaaccaatttgtccaaggccatgtaaccagcaagtggcagcattaagttgctaacttcaaagtcattgcccttttcattgagccacacggtctcccttggagctagaagataaaaataagctttaaaacttattgaaatgatcatagatggttttgaaaaatagaaagtgctgttaggaatctgtacagtaatggagaaataaacaaaacaccccaagaatgaccccaaacttttatttggcagaaggcttcaaattccattgatatgaaacaattctctgtagggacatactagggtgagttaattgtaccctgagtattctatggcagggtggcagcctttcctattgcctcataaagaatcgcacacacactcttcagagttcattttagtacttttcagcctgacatctaaaggggctgctaccctgacaaacacaatctggccagatgttattattttgcactacatttaatttcttcctgccaaagatttaggcttcttttccctgataaagatcaggggaaattgtctggtatttacaaaatcccatccaggcatatctgttacaatgttcacttagcaaagtttattagattattagggctttaaacccttgggctctttcattattgaaattaaaaaaagaaaaacccaaacatcttcaacaaatttaagtggtataattagaccctggacttgtcttacaggcattttagaattatgaaaatgatttaaatagtatttgcttcctgagaaacttgctgcattcgacagggatgaaaggaaagcagttaagctcctttggtctcctgagttaatggggaaagtgatatctggaactgaaataaatttgctatagttgtatggtgaaattactcccataagtagttagccataccacacagggcctctctttcttggcctagttaaaatgtagccactgtagtgttagaggaacatgtgggtctgtcatttccttgctcatgaagtcttcttagagtaaacactgaactagactcctgaagctctaatttttgcttatatacactatactagacatgtaaagaagacagtaatagaaatattttcaaggtataatcaactatgatttatatacactgcagttttccttaaaggatttcaatgtgacttgcatgcagtaattgtattttcaatcatctccagttgaaagttggtggcacgattgttattttctctactgtctgaatgtagacatggaagaatttagacagtgtcttgacttcatcaacataaggagccagtagctggtctggaacttgagctagtaggatgtacatgagagaggcaatctagtagaaagcaatgtaattatgcttatttgttttggggagtgaggtggggtagctactaattcaggcacccaaatcctgtaacattaaactttgcttaagaaagaaggagaattatttaagaaaattgaatggaagtttttgctacatgtgccaacttgagtattttcttctattgtacatttacttggtgccagatgaggttttcaacaaattgtgaaagcccagatctttagagactatgttagaaatgtctcacaattaagcaggaccatagttggactttttcttcttattttgaaggcggtcagaagtcttttatgtgaaaactgtaacagtgcaaacatatgtttgtacattaactatacaggcaataaatgctgaaatggcagaagtgaactcaaggcagaaggtaaatattttgtaaaaattaatgatctagagtgaactctcattaacttgggctctgttaatttgaatattgtgatagtttgacttgggctgaagtttactttcatcccatttatgaagaa

SEQ ID NO: 139205 - DNA, 1316 bp, Homo sapiens
actatactgctttttcatatagccatctttccatgtcaataatgtacttctgtaacacaatataaatatagtatctaggggctaccctttacttactactgtggatatttcacatgttattaatccaaccctctctattgttggaaatgaaggttgctttcagtaagccacagtgaactaaataatgtccgtgtaattaaatatttatgcacatccttaatgatttcctcaggataaattcctggaagtggaattgctgggtcagagactatgcagtttttaagatttctcacatttattgcctatttgatttccataaagtttgtatgtgctttcactttacttctttttaaatactttaacttttaatttttgtgggtacatagtaggtgtatatatttatggggtatattagatgttttgatacaggcatacaatgtgaaataagcacaccatggagattagcaatgtaagaatgtccattttcctgtctgccccttgccattttatcataatcccagcgtgggtgaaaaaaatagtactctttggttgccagtgagatttgttgatcatttgtaccttttattttgtgatttttctcactaatattctttcatcatttggaaaaatttaagtataacttgtcccttactagttgtccttttcttattgatttgtaacaagcagctctttgtatattcagaatgctagcccattttgtataagttgctttaactgatttgttaattcaagttttctttttttgtgggggtttaaacatactttcagtcaaatgtgtcaatatcttaatttggtttccaatatattctttgattctttactaattgatattggccttagcatgaatcaaagatgtgttctatttcctgttctgacaccagctgtgtggaaataggtaggtaattcaaagtctctaagtttgttttcttatatgcaagatggtaacacctgacctgccaacctgctggagctcttgaggatcaaaagaggtaatatatatgaaaatgttttgaaagtttaagtgactagtgtagttgttattcacttgtcccttggcacttatcagtctgtactatatcagaattgcctttcttcctctggatctgaaacctttctggccttttaataggaagtaattttggtctagaaatgcactggagcctgtgccctggtagctggaaaggtgctctagagagtggtgaaatgtagcctgccaccaggctctgcctggagtgtggattctggacatccttcccagttggggaaatgggccctggaactattctttgatgtag

SEQ ID NO: 139206 - DNA, 2321 bp, Homo sapiens
ctggaggagactggctgtatgaaatctccagatagacatgctgttgatcaaagagaagaacacatgagggagttgggtaaatcagtgcacatctttttctcaattaaactcaaactcaaattattattattattatttgagacagattctcgctctgttgcccaggctggagtgcagtggcactatctcagctcgctgcaacctccgcctcccgggctcaagggatcctcccacctcagcctcctgaatagctgggactacaggaatgtgccaccacacagggctaatttttgcattttttgtagagatggagtttcgccatgttgccctggctggtctcaaactcctgggctcaagctatctgcccgcctcggcctcccaaagtgttaaaattacaggtgtgagccaccatgcctggccaaattcaaattattaattgcctattagatactagcctttctggactccttgtctatacctgtagtctctcacttagacttccctcttggaaggggcaaacacctaggaggcagcaaagggcatagtgtgatggctatgtggtctggcttcaggcagactggtgtctaagtcccaattttgccctttcctctctttgtgaccaagggcaggccacttctctctgagccattcattaaacaaaattaaatcagatgagtgctgtgaagaactcagctctatgctggcccataggaataaaatgcatggtagccattgtttttattattccctcttgtgcatttataagcatatatatgtatgaaatataatatctttgctttgcagtaatgaatgtcacatatctggcacatatacatttttaaataattttttatgttttaatataattaatgtcaaaatgcactaaatacccactcataatcctctcattcagagataaccacttgtaacatttttgtgtgttttcttcctttccctttctgtgtgtatgtgtatatttaaaaccgtacaatatacagtttctaaatggtcccgtagtggtctgaatgagttaaagtagcctctagatctactcagcaaagggagactgattccactggattacattaagaaaagaaggagaacaaaaatgttgaaaggaaattggaatgcttatgacactcctctcctttggtcagagttctttagcatatagttctgaacccaattaactgaaatgtcattattggattgcatttcttccctctcctgggaacctgtgcttttcctttctagcactcatcaggttgcagtggttacaggagtatgtatggttatttgattaacatgggtatcctttactaaagaatgagctttctgtggatagggcttgtgtctattctaccatatccctctgtccccaggtgagacagtaaactttcagtaaatgtttgaatgaacacacacacatatatatatatatacatacactctcacacaaaattagaataagtagtattgatagaaatagatttctaactgttccccttcccctgcaacagtatgaccaaacagaaaagaaaagatagatcctgttgcctgcagcatttacttctaggttttaaaagctgcttagatataagatcttaaaagtctggataatggggttttgctcgcccattgagatggaacatctgtttctctaagcctctgcctcagcttctggccccataactctgaggctggctggttgtcttttcttccagcatgacctaggctcttcccagaacactgtgaacaagattcagtgccacagatttgcaccttgtgaacaagaaccatgagaatggtgacacctgtcagcttgtccaaatacattcttgtgtgtcctaccaccctttcacaaggacctgaagggaagagaagctcccttttcttgaaagccttgtagcaggcagacatacttgtatttatttggaccttgccagcttcccttcaaaaaggtggtattaatcccataaggagactaaaactaggagagtttggtaatgtaggcaagttaacccaatgctaaataattgagttgctagacccaagactgctgaatttaaattgtgctattctcttataatgctatgtgttctctctcaatattgttgctagtgcatcaaatttggagactattcacataaccttacctttccttagagttttatatttgatattttagtggaaggcacaatgtcagaatagatagtcttttaagtcaaatagtcctgtattcaaatactcttgttactcactagttacgtaacccccttttacaaaatgagggtaataattacaaccttacagcactgctg

SEQ ID NO: 139207 - DNA, 1991 bp, Homo sapiens
ttctttccccctgactagcctgacagttctgcccgcactccagctctgtgcaggctgagccccattgcatccccaactctaactgtccgccagtctgtcacaacccctttcttggttaaaaataatgtatgggagagaataattacactgatgtctaatcaaaacttaattcatttgccgaggctaaatacaatagcattaaactgaataggataattttaggaactcaaaccatggccatgagtgaagttatatatcctcaaaaatgtaaattattaatcaaaccgctcatctgtacagcaaagctctagtaatcccattataaaagggtgaatttctcattagagcccagaagatgctggcattaattagtggactttcatggcaccaactcaaaggcatattttggttacaaagtttttaaaaatgcaattctttaattattagggcaattggaaaaccaactggaaactgagtgtttaaagccatttcagttttaaagtaaaacttttggattcaatcgggtctcaaaattctgtggctttagtagagccagaggctgggggagttataaacctttcctgggccctttattgatttagaagtcagtcattaggctgaaaactgtttaatgaaaagagcttagaaaaacgactcaatatgcagccagagaccattctggggccaaccatgaggtgaggagattatgcagatgaactcttttaccccaggccatcgcccttgattgaacaaggtcctgaactcatgcccttgatttaacagggctctgaactcacctcctcttgctgtcatcatcactgcccacctttctcactagtgggctcaacaaagcacattaaaggacattgtccctgccctctagaagcttccaggaaaaacaccacttttgcctagagtgcttactctccacctccccaccagcccccaaactggaatttgtttactttctgaaaacatatgttcctcctcttctttctgtctcactgagttgcagtacctgatattggagtaatgaagcatatgtttgagagatttgaattctcttgtcagtagagtggaggtagaaacaatttccctctaagctggaaatggtaacatagaaattaaaagccccttcccttctattgactgtgagatacttccagggactgaggcacctgtattgctccttttccttcattgcacttttcagtcaccaggtctcatttcttcctgcatccttcttcacatcattttcctacattccaactgagaccccatcggtctcagttgtctcatttatcatatgcagatggcttttgattttagttcctctctgatttcagttccaggctccatcagctaacatctagactaccagcaaatgcacccctgggtttcatgcctttagcctcccttgcttcccagttcagcaatggagtgtaatgattaagagtgcaggctctagggggcattctgacagggtgtgaatgagtctgggtggggtaggcaggctggtatggagagaagaaagttgagggcttgggtgaggattagagacctcctttctgaaagtgtactgtattggagagagatgaataaaaaatttcctcttctcaagtgttttacttatctcatttaaacctcataacaaccctaggaggtgggtactttcattagcctcattttatcactgacaaaatggaggcttaaagagattaggtgacttgtttaaagtagcacccaatagatggcagagacaagaattgaacgcaggaagtacagctccatagcctgtgcccttaaaacagtgctatatgtgtgatacagcctctgtgtatttcatctcatggtcataagcagtctcctcaattctaactttcctccttgcaagggaactctattgtatttaattaaaaaagcattggctgagcaactggatagcatgtctaaaggcaggtactgtgggggattcaaagagaaaaactacc

SEQ ID NO: 139208 - DNA, 1050 bp, Homo sapiens
gagcctactactgttccatgtttatgcgtagtcttggcacacttgattttctggctttctagggggggatccaagaactcactaaatgtggcacttggggacatttaatagaggactatactcctacaggccacagtggctcctgtattacgttaggtccaagtgatgttcacaatgtggttacaagtaaataaggaaagtccaacttacattcactgtccttttcttaatatttccattttaaatggctaaaatgaatttcctcagtgcttaagatcagcgaaagaaacactggacttggagtcagaaaatccaagttcaaattctagatctgcatttatgagctttatattttggggcagttatttagactccagtagcctcagttttcttatctgcaaaatgggcataaaaattgcagtcctgcttacttttgtaaagtagaaataatgaatgtgaaagtatcttgaaaactgtaaaacaccatatgcatgcattatctagacagctcatttatgtggaccactttaccccaggtggtgccaaataaatgatgcattatcattacagacattaacctcgacaaggctggagttcatgatgtatttcaacaacttttgccacttattgatgatatatatgcaaacagctccagtgtacagacaaaagagtacttaggcaaaagactctttgggaaaggggtttattttatgcactcttggatgtgaggctgtactgtttgaagtgtcaatactgccaggagcaatccttttttcagcttcctgaagcttctcttctggctagtatctggtgtatttcatatatgaataagcagctagatcaggagaggtttgtcggttcaggccatattttaattgcattttttggtccacactattatggcagagaggagaaaaaggttggtataagtctagagatcttcagttgatcctcactcagtattggcaagcttgctttcttctacctgctttctgtggagatgaaaaagacatctctgaatgggggggagggcagcgtttctgtgcttct

SEQ ID NO: 139209 - DNA, 3909 bp, Homo sapiens
agtattgggttggccagacatacatttcatttggaaatcataactggaattttgaaaattgtttcttggttgtcttctcattcatacattataatcaggaaaaataaattataggagtgaagattgatcttttaaaagacaaactaaatatcggtgttcagtgatgtgtttttggtgctataaattagtttatgcagaatttatgagtcaaacctaggcaattaattctgatggttattcaaaaagagtcagccataaggacaattgggagaaagcagggattagttaagatgaaacgtaattttgaataatcaaaattttactgtatctcaaaagaaatgcattgtttgccctgtttgccatgtgtgagtgtgtgtgtagggggtgggggtggtgtgggtgtgggtgtgtgagagagagatcctgcttactgaaacatgaaaaccttgtttgtttcaggatcagatttgcaagtatgtctccctaagggcccaacatgctgctcaagaaagatggaagaaaaataccaactaacagcacgattgaacatggaacagctgcttcagtctgcaagtatggagctcaagttcttaattattcagaatgctgcggttttccaaggtgagttctggggattattttagatgtgctgcttagtggcatcattatttgggcactgggctttcaaatactaagtataatttataaattaccattccagcattaatgcttgctattaaaaacctcccagtgagaaattctggtttaaaaaaacacattttcagagaagcttcatttcaatctttggaaaggtgagtattgtcaaaaaatcattgtccaaggacattctatttacctgtatataaaggttataaatctctacagaaagaataaataatattttctctcagcttgattcaaaaacaaaaaagttcccttaaatactgagcccagttttctccaggaatgagttagatgcttgtgggatacatgtggactccttctgaccactaggaccatttccatttaagaggcagacactggcttgttggcccaggattttcccattggtgtgagtggtgacctctcctctctttgtgactctcacttcttaccatgcctgtgaatgattgcaagagaagctgttgtggcattgccagaacgggtaggaaatgacacttctccttgctaacttagtaggactatcatagcaggatggggagtacctccttcaattctaacacccagctaggaagatgatgatgatgatggaggtggtggtggtggtgatgatagcagacacttatatggcaccatgtgctaggtgctcttttaagtggtttacatgtattaattcatttaatcctcacaatataattatgagtagatgttagtatccttattttgtcgatggaaatctaaggcacagaatgattaagtaacttgctcaaggccacaaaattaataaataaatggtgaaggcaggatttgaacccagatggcatggctcttagagtctattcttttaactatccccataggctgcctcctgtaactgggaaaattaattatgggtattcacaattaattagtaattaattaattatcagtctttcttctatccttcctcaagcagagggaatcagccacctttttcttgcctcaccaagagaggatcgaggtcagatagaaaaataacacttctgactgcttgacattgcaaagcttgagatttatggcactgttacaagaattaacctctgaattgtaaggtgtgttgattatagcttattttgtgtattataatgaaatctttagaattagctaagaaaattgttcagattagttaataaagcctacattcacaacagtttcttgggtcaaagcctcagggggtattaggttgattatatgaagtataatatataagcttgaagtatttgttaaactatttatgcagtcagactcttgtgaagagtttgttgagactaacaatttggtgatagaatgaataatttagacagattttaaaaatacatgtagcattcatgaacttcttagattggttttggagttgatctgttggatgaaagtggggtgagaagaaatgatgtgacatgagaattgggttgaagcagagagctgaatcttactctttggggcatcaaggtccctttttagaacagagtattagtgatttgtttaattcccagaatatccaagctcacagatgttaccttacaatccttgtctggttggaggggagtggtagagtgatcatactggcattttaacatttacagtagctgacatggctatgtatctgagggcccgggtcgtcagcatttacacctctgtccagttctgcactttgcccactgtgttttctagatctgcaaaaatgtgagactaggagagaaaaaaagttctgacaagattttggttggattagcttccagataagcctgctatagcttggaggctgaatactagtcatgtgaacagagggtagaaaatgggggcagcatctactaattgtatctctctctccctttctctctgtctctctttcacttcacacacacacacacacacacacacacacacacacacacacacacactttcttgaattgtggggatagacagaaggacaaccctagcaaaggaacatggagacaatgaaattatgtctgagctaattattgctagtgccctttaccttgtcaccatcggtactcattctttatcttgtttcactccctcttctcattcttttcctgcctcacttttagaaaaaataaacccaacaaggaaaaataaaccatgatcccagacctcaaggcacttgtacaatgtttcagaagacattgcccctaaatccttttgtaacaaacatttggagagacaagacttcaaactggggaccactacaagataatgtattattaattgctaagaaaaagagagcatccactttttttctttcttatgaccgtttattattccattgaattgaaattaggagacacaattgtttttcccctaaaatacatcccctccccaatattctggtagaccaaattagtgagaaaaccatcccagtacttcactcatgtgaaatttgatgtgacggcttttgctagctattttctccatcacatgaagttgaagaaagctcatcttgatcttggcctagatccacaatctctttggtattccttcactagtccacattgggggtatttaagcagtgagtgctttctgcaaatatgtgcacagttccacgagcaatccttactgcctcgatttggattttatgtcttcatttgcaggaagcctttgccctcataaatgagcctggggccctttgctacagtggttggagtgctctattgctaatgttgttttgataatgattgaagcatttaaaaaagttgttctttattctcagtctttgcattgcctcgtttcctaaatttaatttacttagatgtgcttagtaaaatggggcagcacaattgctttttgtttctgcttaattaattctttctgaaaaactccactaaaagtagactttcctttctctttttctttttcttctcccctaccttataatagttatgatgataacaatagtgaagatttattaagtgcctactatatgatgctgacttttacataattatctcatttaattttcccaacagccctatgaggtctgtactgtaattatctccattttacagatgaggaaactcattgatgccacagcttcttctgagccatcacgtgacatggctttccttgttcttaatgtccttgaggtaaaacaaaattgagaagttggatttgtggttcttgtgaagaaaaatggaatagaattctgaatttttcgtcatctcactac

SEQ ID NO: 139210 - DNA, 1016 bp, Homo sapiens
tactataaattacagtgctgggttcagtttggtgatatgtattatctgtgttctcctttactgcttttgtcagcagctcccttgagaagggtgaagtggagagcttggagtcaataccctggaccccagcagtgatgtcatgtgaggcaaaacttgatgaatttcattcctaaattaagaaaatctggacacataagttaaggacatgatcaactgaaattcctagggaaataagatgttgtaataaaaataaattttctggtgacttagggctaactagtctcccctcattttttaaaaaaataaaacatccaattattgaaaaactgtctaaaatgtctgaatatgctttctagtatgacttcagtaagatttcttgaaacttgcttttctgaggaccttgtaaaactttaggggagtcatccttatatcccatatacacatttttttttcattctaccttcttagtttgctttattgcactcatttactatgcagtagctatttatctctgctagtccctttagacggtgaacttctttggagaagggattaaatttctcttgttcaaagtcgtacctccagcatgtagcacagtgcctggcatatagaaggtatgttagactgggttctctgagaagcagatgccagttggattcatatctaatccaatatggaatagatgtgcaagggatttattgggggaaaacacttatgaaggaaaatgaggagggagctgaaggaggccggaaaagccatcagaccatggtgcaggtctgacccttgtggaagagagaggaaaggaaggaaggttgagtaggaggaatcttagactgcagtgccgttttaagaaagtttggcaaggtcaatggggagtcctcaagccaaagtcccctgtgagcaaagtcctgggttacaggacttagtatctttgccatgctcagtcattggctgggagcagcccccagggaatgtggcttaggaacaatgtggtggtgaattcaaagggcagcagc

SEQ ID NO: 139211 - DNA, 1014 bp, Homo sapiens
agttcctttaaaactgaactctcttgaaattctgacattacctccaagtgaaaggggagaacatcaagcccaaactacaatgggccccttgagacacaaagatgaatcactcaagggtccttccctcaaggaacttaaatctagtggaaataaggcatgcatatataactttgttgcaatatggagagtgtgagaagtgtctttataaagactggagagttccgtgggaattcaatggatagaaagcttttggagttcatctccttctgctcccataaacattctttcccatgggaatccagtccaaagataacgagtagtcatcttatagcagggttcacatagctccttgtcatctggcttctgccactctccaccacttcaattttccctttagccttgccaggttccttggcagtgcctgaagatgccacccactttcacacccctgtgcccttactccattttcttggaggtttttaaagaagtagaatgacataatcagatatgtactttagaaatatttctctgggacttgggtggagaagggtatagaggcaggaaggccagtttggaggctgttgttagttgtccaagtgaaagaaggtgaggtgatgagggagcaatggaaaggaggggaatgattacatttagaaagcaaaatcagtagcatttggtgacatttggctatagcagatgagggtgtgagtgaagtatccagaatgagtgaaaggtttctagttaatttgagagtccattttctataccaattcatgaactctggtgcagggaccatgtcctgttcattattatattccttgggctgggcatagtccttggcataaagtaggcattcagtaaatgttggatgaatgaattgttcaccactttggcaaggtggatataatccgtgaatttgtattctcagagcacatgttgaccactggttggtaaagtggtccaggaagaacctctttatgggagagtgtagtgatctggggattcaacctttac

SEQ ID NO: 139212 - DNA, 1009 bp, Homo sapiens
cgtgcaaagtggtaaatatatggttttcacagatgagatattctctgaagaaatgctgtcacacttgtttatgacaaaaagaccagttctaacatttatggctgtggggcatctctcctctgatgcattatcagagcataccagtgacaactgtggtgtgtcaagagattagtgagttagagtgtggccttcatggaaacagagagaaaggaaccctgggggtcaccagattcagcctccctcctacctagtgtaggagtccattctgtggtatatgacattgctacccaaattatgcctgaatgcctcaagagacagggagattactatgtataggaagtaggctgtcattgttgactaatatttgttcattaattcagcaaccatttattgagtgtgtactatgtactggacactaggccatgtcagggaatacagagatggccaaaatatagctcttgcccacagaaacctataacttaatagtagggataagaaaggtataccaatgactacaaaacctagattgcaaaacacattgttagagaagtacaaaatgaacagaaaattctgagagataacagctcaaagagttcatttggagaggaggggagaaacatgaaagacacctgagagagaccttatggatgagaatattttaatagctgaagctagggaaagagtgcttcagagacaggaaaagcatgagcgaaacagggaagcaggaaatggaggcatgtgtttggaaaacattaaataagagtttaatttaattctcacaacgaccttgagagtaggtgttattgtctccattttataggtaaggaaactgaggctcagagattaagtaacttgcctaagatcacacagctaagtggatggccaagttgaggttcacattctggtctgtctgatttcagagtttttccctttgccactgcatgccatccatcaggaggatatctgccattagttggcttctggagatacaggggcatatatgtaaaag

SEQ ID NO: 139213 - DNA, 1094 bp, Homo sapiens
ctctcccccctactccttctatcctgtgctagaggaagattcctagtaaagtctttagccctgaggtatgagggcattactcacagagtgctatacatgaagacaacacgtgatgaaatggcttaaccaaagtagtaactcaccaatgatgaaacatttagatattattaggcagaaacatttaggttgggtagaggaggaaagagagtgtattagtttcctagggctgccatatcaaattacctcaaattgggtggcttaaaacaactgaaatttattctctcacagccctcatggtcagaagtccaaaatcaatgggtcagcagggctgtgctctcttcatagattctcagagagaatcattcctcgcctcttccggcttctggtggctccaggcatttttcggtttgtggttgtatcattccaatctctgcctccatcctcacatggccttttactcttcttgtgtctctcctctgtgtgtctcttataagggcacttgtctttggatttaggatccacctagataatccaggaggattgacacctctccagtccagtcctatccaggtgttctgggttgcctccctccccactactccttctgtcctgtgctggaggaagatctctagcctgatccttaattacatctgcaaagacccgtttttccaaataaggtcacatttacaggttccagggtttaggacatggacatatattgggggtgggggggggtgacaccattcaacccaccatatagaggagagctttctggggccttctgaatcataccagtttaccagaactctctactgtaaggaggaacttgtttgaagaaatcttaaagttagttgtaaagtgtcagaaatgtcagtgcgcttcctgagagggatgtgggtggcaactactgttaactcattttttaaatggttaaattgaggacctgggaaataaaatgacttaaagttagttgtaaagtgtcaaaaatgtcagtgtgcttcctgagggggatgtgggtggcaactactgttaactcatttttcaaatggttaaattaaggacctgggaaataaaatgacttacccaagtcactg

SEQ ID NO: 139214 - DNA, 1022 bp, Homo sapiens
aaaagtgcagcctaagtatcccctattctatcctttttctcttcttaaaaaacaaaaacaaacagaaaaaacattcacagaggtcatctggtgcagtgaggtgggaaaaactaaaaaggaaaaaaaaaaaaaaagcctaggttgccttcacatctgctagtcattcccactagtgtgacttcaattcagcaagtttttattgagcacctgtgatgggggcggtgctaataatcgttaacatttattgagccaggcactgtgctaagctctttatgggcaacatcctacttaatcctcacaacagcactaccaggtggatagcattgtttcccccattttacagatgaggaaactgaggcttagagaggtttaatgacttgttcaagatcaaatagctatgaaattaatcaaacccagttagtctggttccagagccatgttcctaatgattactcttgtgatgggttcagcatttgtaggaattactcctcaattcagttttgagaacccagtatgtgtgagatgctagggattcaaattcaaatactcccctctccctgctcttggtaggagaagcagacatgtagacagacgacggccatgtatggagtggtccccacgttgattgagggggaaagaggaagaaatgggaagaccagtggcttgaacctgtgggaatgctacgtcacgaaggcagcccagcagcctggggttataggtatttcttttcctgtttggtgaaggtcatcctttgagttgaactgcctcaatgattgtatcaacctgtttccatcattgcctcaacccagtgtagcatcagctaccttgaacccagcactcctaagacatgcatggtcagcacagtttgggccaactggcctcatagtgtcaccatttccctttcagttttcccttaaaaagtaaaaagcaggctggacacggtggctcatgccacccagcactttgggaggctgaggtgggcagatgacttgagctcaggatttcaagaccagcctgggcaa

SEQ ID NO: 139215 - DNA, 3628 bp, Homo sapiens
attttcaacagagccaaaaattagtccattattttcttttcccatccacacaaacctgcctctccttaacgttctatatttctggtgatggtatctctgtctggcaccaactcgaaaccttgaaattgtctttgatttctccttttacccatcccacacccaaattaagtgactaaatcttgcaagtctacctctgtctattatgtctctcactcttatggccttggcgtgcatgccctctatttaagtataacagactgagccaatgaatgagaatgtgatattgaatgggctagggagagccagtaggatctctgctcagtggctaataatttgtaactagttggaaagtactgcctttgctgccttagatgggtagaacctctagtcttggccttggcttaatttaatgtgaccagaggcagctatctcctgagatcatttggctcttcccatagggaactaatggtttcccactttttcttttgctggcattctggggtatatcttacttggccatctccagaagtcagagtggaactattgaagagtttcaaagagctgtggaagaactgtgctcagtgtttcaaatagtcctttctgttttcagaaacaggttttctgctttgttttcaaacttcaaagtttatttctgaaataaaggattattttccccatggtattctgaaggttttatacaagtgttaatttctaaaacctaagtcatttcttggctttaaaacttcagtgctgtgggtcaatttaataacgttgcctgaagggttttttggccttcaaaagctgtcagattgctttttctttgttctttgagagtgtaaggttgcctcatttatgaagcttgaaggagatgttggaaccagcatttattcaatcattcagagtcttttcccaacaatatccagttttagcttcaaattagatcctagtggtaatgaaatttactaccaactaataattcggggtaaaatgggtaagattcttgaaaagctcctcaacatttcatagagtagtgataagaagtagcctaggttactctaacacccacagttaaggggaacaacggatgttctgtgcactctcatcacagccctcctggggctcaatatacctctgaagctactgagggccctccttctgtctgttggactgttctccgcatcttcctttctccccttcctcctaccctcacaccctctctcaactgattataatttagaacagaaggtgctttatggttttttatatttattaaatggttttgtttcttgttctctcttaaaaaaaagatgagtggaatgttttatattttcctctgcattttagttttaagctgtgtttcctttccccgtagcttctgatttccatctctcctctctcttcctccattttcctctgccttctccacttctgtctgtcctcaatggagagaaaacaggctttcaatttctgcccacatattttatttgggtacctggtttacttatcttgagatattgtaaaatactattctttagtttgaaaatgaagagccctaaaatatacaccaatgaatttacattccattttctaagaactgagtatttaaaaagctttctatacagatagaacaaggctagatgacctgacttgtgtacctcagatcattgctatgtagtttacattctgtctcaccttgtcataactctcaataaatgaaaattgcatctttgttcttagaaatctcttttcttacattgaatgctttccttttttctgaagataagggagcccctttgaaacagcgctagtgtgggttaaaactgacacctaccttgtaagctaaccaaattataacctgcttttccctgatgaagttatcacacttcagggacattgttttgcttgtggggttttattgtcccagtttcaattttgactgcaggttagagattgtattccaattggactattccttggtattttttctctttgtctttatacttatggggctctgttgtttgtcctgtatctattatctcttccaagcttggccaaggttgttaggttatgcacttatgtataaatatttaacaagataagttagacaaaatgtgcttgaagacatttaagccctgttccccaccttcccaccaccccaccccccagctcatttttttgcatagagtcgcagatagttgctttatctcagatgtttagatttggaggacattcctttgcactttgcttgatggacacaattaaatggaagccttttagtcaatcttgactaccaaaatagtagcaccaagtaacagataacattaggttcttcttcctatttttttttttttctaactggttatccaaactcccttaagccagagagttttaggtatgagattgtgtgttttttaagaaaatattacggataaagactaatgttctcaagtcaggaataacaattagtaccattcattaatcaggaggcatgttttgactctgggtcctggctaggaaatataaactgtgaaagtcacacatatatatgaacctcaagcaaatttatgacttgtcagccttttaaggttaaattcttaaccccagatcggagctggctttatatgtggagcccggcacattcctctgggccactgagcacgcccctccccagccctttgcttaacagcagctagtggcctaatgagcaagaaggatttctgtctcttatcagctgcctaaacagcaacaggaaggctgatatacggagtacaggtcaaaacctgagttcttgaaccaaaaagctacaaggtcagtttaaaactctagatatgtggtaccgctatagtcatcaatacctgtcagtaaaggagttagacacttgagttcaaacaaatagtaatagttgtcaaaagtatgaatcgtctaattaattttgctaatagttctttccttctttgtttagttcttttagaaatagccttcatatactctttaatgagcttttagtttgtgcctggaggttgttatggtcgtgtaggagtgtttgattgtcatctagtgatgatgatggaggcgaggatatttatattttggcccagattttggaaggggctgccaaataaaggtaaatagatatctactactatttttatttctttttaaactggggtttttttgcatatgcattcaacttgccatggagtcagagaaacctttgtgcctcctcatattgcactcagatgtttttttttaaaggagaaatcctcattgcctgtttcttagatgcacttggaatccaggctcagattcacgtagaataaatattttagggtattcagtgcccatcatagtgaaagccccttgactttcatcttctgcatttgcatgttttcagagacaataatgaaaactttttttcagattctgttgtgttattgaaaatcctatttacataaacaggcattgttgtggcttagggaagaatgtggggtcccattctttagctccttgtatatctttgctaaggctcgtctaaatagaagtaatgacgctttagtctaagcagcttttctcatttaggtaagcagggtggtttgaaatttcagtttactggataattgagtctctt

SEQ ID NO: 139216 - DNA, 1053 bp, Homo sapiens
ttcacaatcacacattacatttgtcttgtgaaagccttgccctcatatagctcacgtacacacagtgcaaccactcgtaaagtgtctgtagcttctgagttccagcaactttagtggttccaacatggtggctcctctgtccctcccccagggcagtactttcccaatgtaaagaatgaaaactgtaacaatatgtagcttttggagctctggtctgtattctgcttcagacttggccctgatggctggtctctgaaacatgtggttccaagtaaacgctaggaatacttgtgtaattgggctgatctttcataagtgtctatggagatgtattattttttggtttaggggttggggagggttgtataattttctgtttctctggcataaatggtttctttcatttctctgttgtttaagagattgccttcatcagtgtttctttcaacataagcttgaaactccttgtattccagttgattttttgacaccactttcaggttggtggaatagtttagaaggaccacgagggaagattatggaaattaatctttactgagtgcctactatatgtcaattactttatatttaacctctcatttaatcaacacaggaaacctgaaaggtaggtggtgtcagctccattttacagatgaagaaactgaggctcagaaaggtttacttacccaaaggttgtgtaagtggcggagccggaattttcacccaggtttgtcttactccatagctcatgctgtttccagaatacctactggagtatgagaggaagggatatagtctggatataaagtatttgacttaaattcccatactctgtcaacttctgtgacactgtgtactctgggttcccttcctactcgcttcagtctttgcttgtttgccctcttcctcctacactttggatgtaagtgtcccagtagtgtttgtcttttgccctttccgttctctctttgcttattcccacatccattcccatgacttcattatctttgctctttgaatgattcaacctgacctcttccttgctcttcagct

SEQ ID NO: 139217 - DNA, 1115 bp, Homo sapiens
tttgggttatacccaaggatgatgaggagccttgaaaacattttaagaagggaaacattattcagttggaggatgactggagagtgagcggtggcagggagttttagtaacacaggtgatagggcaggggaccataaataggagaataaaagctaaacttgagagaatagagggagtagaatagacatgacttagtgactggatatgaggacagaagggagaatctagaacttttggtttttctgggtggtggtgctgtggcacataataggtgcttggtaaatatttgttgaacaaatgagtgtgcttgaaatataggaggaacatgtttttaagggctgaaataatcagtttggtttcaaacagattgagtttgaaaggtcctttgatgatggaggtagaaaatgtctgctaggtagttcaagttgcgttttggattacaaaagagggagaaatcagggatggagatatatacttggaaattatcagcatatagatggtaattgaagccctgggaacagatgagttcactgggaaagagtgtatatattcttctggagttaaggagaagcacatagttgggactcatcagcatataggcttaagttggaagtcgtgagtgtggatgatattttccaggcttttgcatgtggcatgtattaaaatgtattttgccaacatctgatgatttaaaaaaaaaacctgccaaagacttcaagaaccctcttgattaagagaaagtatgagtatatgttgtcatgatccaagactctgcaaataagataatgtactaccaaacacacacacgtgcatgtgcacacgtgcatacacacacatctctatgtagaggaatatattagaatcaaagaatcagacttctattattcttgatagtaataatgaataattatgcatgttatttaaatggaaaggctggacatggtggctcacacctgtaatcccagcacttttgaaggctaaggtgggaggactgattgagcccaagagttcaagaccagcctgggcaacatagtgaaaccctgcctcttcaaaaaatagaaaaattagctgggcatagtggcatgtacctgcagtttctgtgactcaggaggctg

SEQ ID NO: 139218 - DNA, 1067 bp, Homo sapiens
tacctgtaatcccagctactcaggaggctgaggcaggagaatcgcttgaacctgggaggcagaggttgcagtgagctgagatcataccactgcactccagcctgggcgacagaggaagactctgtctcaaaaataaataaataaaatttaaaaaaggacataatccaaagtgaattttccgccatggaaatttcatttgggtaggataaagggcctcatgagagttctcttaatttctgtctgcattaggccaaactttcaattagttgcctaggtaaactaattgaaagttgatgggaagttctttcaaatattcaaatagaggcccaagtaggaaaaaggataaaaaacgaagggatgatgttcatttgaaaacaaaaatcagaattctatttgcatactcttctccttaattatggctctgctccctctctcccaaaccctgcatatcagtacttacagtgtgtatcatgtcaccctgggattcttcattgctctttgtcaaactttggtttgaatgattgaagctgatggaaacatggtgaagggagaaagagttagagtgacagatatagggaggagtttaaaagccttcacttggtatatattagaaagttagctggcatacgacagatggaaaggattggaaaatatttgagtatggaaatttgcatgtgtgcagagagaatacagaaggatgtcccaattgcatttggttcagagaaatactttatctgtacttctcacttattatccatgttttttgaaatatgtagcttattcatggcctcttccagaccctatgcttattgaatgcagggaccatgtttgattcatcatgatatcctctagagtggtgagtagagtgccttgtacagagtttttaatggattgattaattagttggaatgaatgtaagaataaacacctaaagacatagtctagagagcttgaccactgtccagtgagatcctggggtggcatataactatagaacattgattctctgaatgtatcattgtctaaactaatttgcagcagagacagaaggggtggtgaatttgaag

SEQ ID NO: 139219 - DNA, 1256 bp, Homo sapiens
gcaactcccaaaagattgagggatcttgccttggaaggccttggaaagtgcgagaaccaatccagaaggccaaatgcctgtatgggtaaaaggcagtcttgaacagccaaaattgacttggagtttcttgaaatagatgaaacaacataaaaataaaaagcaatgtgcttgaaacaaagagatagtttggtatttgtttttgttgtttttactgtgagaactagcctccgtatctgggttgccagctgcggttccccaattagtttgaagcagttagcggtcctaatgtccagagagagaataataagtgaggtgtggaagggttttttctcttctgagattgcacgagacatttgggtgaccaggtgatttgttaaaactttgaaactttgaacaatacaaaaaactctgtattgtgtgctacttggaacagttagagaattctttcaaatgtggtctgaatagtacacgaatcctgatactgataccaagctgtgcttagagggagccatcaatctgatggaggacatggctgatgattggtggggcaccttgggctgaaaggagtctaacactgccaactccttggcagcctctgtaataggtgctggggttgcagagaggagtgagacacaatcccttttgtcaaggagctcacagtctagtggggaagcatacaagtaaacaggcttcccaggaaacttgtaggattaaaaagggtgaaaagggctagaaaatacctccaggaaattggctgaaatggtcacaatagccagcctgggcaagggaaaagaactgaagagatgaagtgggagatagggagaagtctcttaatagggccgccatcttaaaaagagtttcttaattcttggagcaaattccattttggaagcattaggaaatacagacataagaagaattttaatggttgctaaatgacgcagatggcgtcagttttgcaatgtgtttttttcttatgggctggtaggttgtatccaatattttgatgcaatatttttgagcattctgctacttccatctttagagttgcaatgtttgctgttcactgtagcctagaaaaaggcggcttattactgatctgggggaaaagagtcctggatttgtctggtatgagacaagacagaaaatatgttttctccctaaatgacagctatcaatgaccacgccaacttcagtgtttgatgcatatacaaaagcatgggtcttaagagttatcttattactcatttctaaga

SEQ ID NO: 139220 - DNA, 1059 bp, Homo sapiens
aaaaatcctaaagggaaaagccctccaggctgtaggccaatgagcggcgggaaggaggagtgaggctggggaacttctcccagagccagtcagagcggacggctgctgggaagccaatcagcgcgctcgagcctgcagcccctctgcagtagttatgccagagcgccctgtgtagagcggctgcgagcgggcagctgggctcggctgccgggagccaccgcgcgggctccgcaccctcctctcgcactgccttcgcccggtccccgcgccgcggtgccccagtggcccccgccgcgctccacgccgcgcccccgcaccccgccggctaccggccgcacaaccgccaccgccccctggccgcgcggctcgcctcgccccgccccgtccctcctcgccccgccccaccccagtcagccccgccctgccccgcgccgccaagcggttcccgccctcgcccagcgcccaggtagctgcgaggaaacttttgcagcggctgggtagcagcacgtctcttgctcctcagggccactgccaggcttgccgagtcctgggactgctctcgctccggctgccactctcccgcgctctcctagctccctgcgaagcaggatggccgggaccgtgcgcaccgcgtgcttggtggtggcgatgctgctcagcttggacttcccgggacaggcgcagcccccgccgccgccgccggacgccacctgtcaccaagtccgctccttcttccagagactgcagcccggactcaagtgggtgccagaaactcccgtgccaggtgaggaggggtcccttgagcgtgcctagcgcccagcggggagcaaggcgcgcgtggtggctgtaccctgagcgcgctagccccgccgggctgtagtcgtgcgccctgcagctgggcacttgggagtggtcggtgtgcctggggcctggctgggtctactgagggagggagagagggtgtgtgtggacggagcccacatcccccagtctcacgctgctgtcagggaaggtgtgagcgggaggaaccgtggggatcgccttctcgtgagcgcccgt

SEQ ID NO: 139221 - DNA, 4421 bp, Homo sapiens
ctctcattttgcccggtgttcaaagtctggtatgcttaattccattttgattgtgcgtcttaaactaagacatcattttattctacagagcgctgtcgggctttggccttgaagcagcccgccctcaattggttctcattagcggtggaatgagaggagaaagcaagataattgcaccgtatcttccgcacatttgcgcgtgtattcggtggctgctaccgttaacgatacctgccaagaaaccctgatttagtgggtgaagagggcgcctggcaagggcgaaagcctcccaacagtagcacaaggtgctaggggttaaaactttcacatgtgcagagagtaagtcgtgtttctatttcttccctcctcgggccttaggaacactttcaatctagcggcgaggtggcgcgcatgcgcgcgccgggtgggggacacccctgtcccacggctccgtgggcctcgtcgtctgtctccggtggggggctgaggcgagcgccgcgggagcgagatgggacaaggtggtagtgagtgcgccatcctggcccggatgccggtggcacccgcaccggctccggccacggcctctgcctgggccgctgtcccaggcgcgcctttaattaaggactccagcttgggggaagagagaagggaaaatgccgactgcggtccgcccgtgggtaactggggctcggtggggttttcgctttggcggggtgggggttccgtttcctaattcctgtgcgggccgggtgggcgggggcgggcttttttccttgggctattaaaggcagaggggcgggcttttcccagggatatagctacggacagagggccaaggggacggagcgctcctcaagtggtggcagggaggctcgtggccccgcgtcgctctggacaggggcgctttggggtgagatgtgcgctcgcggccttgatccatttagtggacgctttttctcacttctcttccccttctggctccgcgggagactgcgctcgcacccggccccggagcgctcgagctgcgcgctgggacactgggtatacgtgtggaggggacacccggagagggcggcccgtgcgggatccccgcgctctccacctgcgaggggcgggccggagctgggtcccgcgcgcggtttcccgagcgggtggctgggcaagaagggagcccttcgttggggcagctgtgatccggtagagttgactggttgggtgggaggggacggagcgggcgggacttgagaaaagcaaagtaccagagtgcggttgaggggtagcgggcagcgcgcgggaaacgactccccttttcttctccaccgttgacctttaggttcctggaaaactttggtggtgagggtgtgaaatgagggggtgcacgtggagggaaaaaagggactcccctccctcttggcttctatcccaccaacccgggaatggagggggagggaggcgtgggcttggcgcgtttttggtgctttgaatggagaactccgtttcccatgatgctttgtttctttctctttaatttcggcggcggctgaggctgcacgaggactggagcgcgtggtgtgagcagctggagcacaccctggacgcgcgggctgctcgcggacttcaacgggagcattaggtaagggtgtgagagacgcgggaagaggcaaaagggagccacaaaggcgtacagggaaggacttctttctttcttttccttattattattattattatttgcaatttaaggggattggagagtgactgcccagcgtgcgcgagggatgccagatgaaccgctaattagcaaaaggtagtaactagaagggcgccctgtctgatggctgtggggctcagtttggccaggttgggttggcaaatactatgcattttgagtcaagtttggagtattttttttttaatggaaaagaaatcttcacaggtgtagaaacccaatttaaggggaaaaatgttatttttctcatttctatactaaatccattcttccctaatagaaaattgattccagattgatgtataagttttataaatcagtttagtttgtaaagacttctaaagactcatttagtggcataagatatcgtgacgaaagttcaacatttaaaattccctcactcgtttaacgtattacagattctgtcccaaacgtttttgtttttcttttaaacaaaagttaccccatcatggaagagataggggaccctgtgagcctttttcacatagaggctcacttccttgctgtatgttcttaggtaaaataagcacttggaaatgggagaaggttttcttatggaagataatgacatgaagggaagaagagctaatctgcctactttggtttaatggagaaaatgggtccataaatgtttaaacagaagtagagccctttgaaatagatcaaaatgtgacatctctcagccatctgtgcattatgtgaagactgtaaggctgtgtttcttaaaccagctctaaaatttctctcattttctattaatggggtgggggctgggaatattcatttaatctaacagtcactttccgtatggagcccaaaagctctgaatgatctgaagactcgaatactcatcctgggttttacatgctcctttctctaggtcctcctcttataaaatcagggtggatagaatgtgcctgcaaattactgagatgcagatatcaaattttcttagatggagagggggagtccaaaatctgcttatacataagaattggactttttgcagttgccagtgttattcgtgttcaattctgtgtaaataattgagattattaatatttctcaggatttggttgaaaccacaaaacctagcttagactctgtaagccaaaggaaagcctgtttcaggaatattaactagtagtttacttgtttagtttctaatatgtgtgtgtttgttttgttgttttaaccaggtgagtctgcatggatctgtgaggacggaaaagaagagctcctggaagacttaaaattttgctacaggaataggccttggccatgtaaaagtgcttacagtgcaggtagctttttgagatctactgcaatgtaagcacttcttacattaccatggtgatttagtcaatggctactgagaactgtagtttgtgcataattaagtagttgatgcttttgagctgcttcttataatgtgtctcttgtgttaaggtgcatctagtgcagttagtgaagcagcttagaatctactgccctaaatgccccttctggcacaggctgcctaatatacagcattttaaaagtatgccttgagtagtaatttgaataggacacatttcagtggtttgttttttgcctttttattgtttgttgggaacagatggtggggactgtgcagtgtacagttgtgtacagaggataagattgggtcctagtagtaccaaagtgctcatagtgcaggtagttttggcatgactctactgtagtatgggcacttccagtactcttggataacaaatctcttgttgatggagagaatattcaaagacattgctacttacaattagttttgcaggtttgcatttcagcgtatatatgtatatgtggctgtgcaaatccatgcaaaactgattgtgataatgtgtgcttcctacgtctgtgtgaacacaccttcatgcgtatctccagcactcatgcccattcatccctgggtggggatttgttgcattacttgtgttctatataaagtattgcacttgtcccggcctgtggaagaaaggaggatttttatcgtcttcttattttaacttttaaaagccgtaagttctgatatttagtcattgtaaaatgatctgttttgctgttgtcgggtggatcacgatgcaattttgatgagtatcataggagaaaaattgcacggtatccatctgtaaaccgcaggacctttgttggcgacattcctgatcagcgctacagtaagctagatggtaaaaaatcctttctctagttgctgctattaaaaaataatttgaaatatatttggatttctaaaaactatgatagctaatttataaagtatgtgttttggaactttggtgaatgatcagattgttactgaatgtgaatgaacctcaaaataaatgaaatttatagatctgaaaaaatgactcttttttttttaaaaaaaataattagcaatgctagaggagtttgtaaaatatctcttgggaggatcctaaaggaaaacttggacatagctgcttttcaagtttgcatctacataaagcaccaagatgcctaattttaggaattttattaccctgacaatatttggatgacatgtactaattttgttttagtacacgtgctcattcttaggaagggaatgaagagttgtaaaccaatgggacacatacctttaaggaactgggca

SEQ ID NO: 139222 - DNA, 1036 bp, Homo sapiens
cacttatattaataaatgtccacaactgacccactaacaggcatgcctacactttcaataatggcttctggtttggtttgccttatgctggaacaaattacctagtcaagtttattgagaacaaaatggctaccaggccagggtagaggagtgtcattgccttaaagcatattccttgttcttgccagagaatactaatgccatactcgttctgcataaaaaaacaaacagtacaatttgtgaagagaaaatgagactggcagcttttaccccgagtctgggatttgccacattctgtgactagatttgggaacaagcccttaaaggatatcttgccaatgaaagagagaagaaaaaaaaaagagcagctcagagactgcttgaccctgccctgtgtaagccatgggagggaaattccaaaaggcttttcaaacctttctctttctgttctttgaaatgtgacatgcagttctccttaccctccccccttcacttttcctctcttcttttgtggccttttaaaagatacctaagctctgaaaatagtgagttgttttctttcaatatggggaatgaaacctagcagatgaataaagaagaattttagaacaagcactgacctgagagacagggtcctcagttttactactatgggctgtgtggccttggtcaagtcacttaacttctctgggccttagtcataaatgggctcttcccatttcagtagctatataggcttcactgaaaggcatttcctttcagacaccaggaaattatacagaggctcagggaagagagacagtgaaaattaaaaagtgtgtgtgtgtgtgtgtgtgtgcatgtgtgcatatgtgtatgtgttttgccagagatttatgggatggttggatgtagaagtaactttttcaaggagcaaaattattaatgaaaagagttttttattttaacctttatccatacccagacctctatctcagatagagatattcttgctatctccagatataaagtgtccacactttacttgcccctgtgc

SEQ ID NO: 139223 - DNA, 1032 bp, Homo sapiens
tgttagctcccttgatgttgttccataaatctcaaagacttgccaattattttatttatgaagggaaggttaggctcctgataaagccagtatataattgaaaatggctatgctccaggattctgcaggaaaagttttaataacactcctgtaatagttaatttagtaatttcttcagaaacttgtgcgatatgttctgcttttcccaacaatttctgttataatcacaatattttctgttccatgttttatccaaagattatcaaatgcataggttgttacagaaagaagttttcctatccacctaggctatagacatgtcaatgagctgatcatgcctttgacaggaagctgaatctcacttacacaagttgctggtctatgaaagaagaggattaatgctatgtcagttaagtggcatgctctagtttgtaatgtaaatcccatagagtttttaaatcacagcatttatttttacactgaaatgggagaatataaatagttagatttctatgtaatgacttcaccaactattttgccagtcagtgaaaagttcttccttcacttgtttgttatgaatgatactagattctctgccaattcagtaacaattaccccacattgccatctaaaagaatcccacttataatagattatgaacaaacgtgaactgaattaatgaatgatgtgtttttcttgtttatttttcatggagcgtacagggtcataaataaatagtttatatcacaatctggccaccaagaaattaaatccatcatcattaaagtgataagtcagatgccaaaaagcagatggacagtggcatgatgaggccttttatgaacgtggcttatatttattcctagccaaagacatgatatgtaggagttcagaccaaaaaagcttggcaagagtgaggattagaccattagaagtaacatgtcttcctctgctcaatttctttattttctcctttaagcaattgacctcctcttaacaccaattcctgaatgaagtctttatactgggatg

SEQ ID NO: 139224 - DNA, 1014 bp, Homo sapiens
gcagagactgtcagggcctttgaagttgtgttaaaaagaaaattctagacataaatggatgagaagacatgttttctttgtggcttcaggtgaaattttgattaagtatctgaattttatattgaaaagcactgaatagtttgtagatattaccttcctagcatacagctgctactgttcttgttggtgaacgaatgcttctcagctgcaatgtagtgttagacaattttttttcaacatagtattatgaaactgttcaaatgtatagacaaattgaaacaatttagtaaattaattttaagacaaaagtttgagatttttcttgattgtgacgtgtgttgtggcaacctggatcttgaactgcttagtcctgttgatttgggaaaactgtacaaatcaagtaactggttttaaatttcttctgaagaatccatattaagattgatgatctaaatctgaaacctttcatgttagagctttccttccctttttttgactacactgtactacctataattaaaatgtgaccaaatttaaggctcattcagaaaaaaatttcttcctttacacaatattactaatttaagtacggaagttactacatttagaagaccactatcagtttgtgactttaattgataagcaggcttggagtaaatcttagtcatataatatggttgttttataaataattgggtcttaaagtctgcatttttaaatagactgtcagaagcctaactttttatttacttgaaaatggaatagaatagcaaaaattaatttattaaagacatattcctgatttttttaaactcagaaataatttttaaagtgcaccaaagtcatagttaggtaaattcgttttacttttattgttttatcaatatgtgaactttaagaaattgttcaattacagaattctgttcccacggagtattctgaagtttccttagtagcttttaccgtgttcttaagaggtataattctttatcgccttgaaagggcacctagtta

SEQ ID NO: 139225 - DNA, 1018 bp, Homo sapiens
ggtaagttggtatttctgcctcttgagaataaaaattatttaaactcattaaagaggaaattgcttattttagagtgtattgcattattaactgagtataattttaaattgcaggcttttctttttttttttctctgagccagcaaaatccaaggccgggtttatcttatttaccactcaacaaaaaggaatgagtcaatatttatactattcaattttttttgcttttcaaagagaattaaaatctttttggaggctgtttacttagaaaacaaacagtttggttaatttgagtatatattgtgttaaagtcttcattcaagtttatttttcataattctgatatgttttcatctccatcataaagttatggtcattacaaatgaacatgacagtagcctctcaaaaggaaaatattagcacttgctgaacaaagtattttactgtagttcagctgtataacacaacatttatgactttggataactttcagtgaatttcacaggagcttttctgaagctgcgttagagtaatgttcccgtagttgtcttcactaccaataaccatattagtaagatattacattgctctgttggaatagtaatgtcatctcagttggtacttatgacacattatggtttactttgaaacgattattttttgtcttttttgtttccttcctttttgtggagaacgggatctcgttatattgcccaggtaggtctcgaactcctgggctcaagctgtcttcccgcctctgcctccctgagagctgggattacaggcgtgagccactgtgcccggctactttgaaacaattaatgggaagatttatttttatttttctcatttgaacactttattaaaattacatccataaatgcacctttaatagctttgctatccagtttcattttttaaaagatgcgttttgccaaacatataactgcgtttgtagttactaaataacctcttatttcacaaagactctgagatggtagtttttggatgaaatggt

SEQ ID NO: 139226 - DNA, 1046 bp, Homo sapiens
gtagagacggggtttcaccatgttaggctggtcgcgaactcctgacctcaggtgatctaccagcctcggcctcccaaagtgctgggattacaggcgtgcaccaccatgcctggcccctaattgactttttaaggcattttatcccgtgagcctgtttgctttggctcctgttcatctggatttctaggtgaaaagtaggtcatgaacactcattcaaaatcatcgaaaactggagtactgaaccctgagtgctttcaagacaaatttcaatctgtacctggtgttgactccaaagttgctcgcttgccccaaagaaaagaacagagagataaggaggctagggcttgaggttaaagtgtacgtatcaacagccaggtgggtcagagttgaggatgagagggctcagtagagcaggaggtgtgagtgtttggtttttatgttcttgctgccacaggcaattttccaaggttcatgtcagccacaaggatcaaaggaggaaagccattctgcatgaacattttcatctcctttacacggtctttaattatatagcaccaagatggaccaggaaaaatttgccagagtactaaggcttttatgatttgatgccctgtttttgcagtttagacagatatatatttttccagtatgatttccagtttctactgaagccatatggagataccacatctgtaccatctattcttacttaactccagtcatctagccaagaaatgcaaatttccaagtaaaattatgagttagcactgcttttttgaatttaaggagatacttgaaagaaggatatttgaagaatttaccgtttctggatgaagctagctggtgagattactaagggtatctactatctacattggatagctattcttctttttttttttttttttttaagatggagtttccctcttgttgcctaggctggattgcagtgacatgatctcggctcactgcaactccgcctcccaggttcaagcaattcccctgcctcagcctccccattggctgcaattataggcgcccaccac

SEQ ID NO: 139227 - DNA, 1571 bp, Homo sapiens
cggagtcttgctctgtcgcccaggctggagtacagtggcacgatctcggctcacttcaagctctgcctcctgggttcacaccattctcctgcctcagcctcccgagtagctgggactacaggcgcccaccaccgctcctggctaattttttgtatttttagtagagacgcggtttcaccgtgttagccaggatggtcttgatctcctgacctcatgatccgcccgccttggcctcccaaagtgctgggattacaggcgtgagccactgcgcccagcctgccttttctttcttaatgctaccctatgtccagtcttgctcctcccacccttccaacatactactggtagttacttgatctctgcttttaaaagctaatgccactccctaactggaaacctttcatgatttcttactgcatacaatataatgtccagaggcctcagcctgccattcagaagtcttgtcttaacccactttttccatccttatctcattctctctcctctaggttttccaagcatcctgtctctgtccccgctgcggtgcctgtactgatgttcacctctgcttgcggctcttttttcctcctagctgcctctcaaaagttctgtctgtttttgagatccagctcaaacttcacacttcatttctgtcatatagcataacacaatatgcgttgtatttgatacacatgtgcaagccttttttctccactgtattgttgactctgggagagtaagactgtattctctttgcccagcctagcatgatgtggggataatgcatagaaaactcttaatatggtgcttgatgtcttctttgtactcaatagtgttctaataaataagtgggtgctcattgttggtggactttgaagatggaaagggcttcagctggataatagtgtgaagccttaataacaggctaggtataaattgaacagggaagtcatggcgtagcacaaaattcctctcttttggttaattagtattttagtgttgtttacaacttgagcagtttgaaaagggaggagagtaatttagagggaaaaatgacgttggttattttttttccagagagtagagagctgtgtatgcctcaaacatgagagttttcatgtttcttcagccttcactccctcagtatggttttgtgtttgttgtttccttaggtattatatttgtcaaggccccatatagtatagagtttagaattcaactgtttatcaaatactttagtgcccactttctaccagcacaatgctaggtactttgaatgtaaacatgaataaatatggtttaaccttagaagtatttaaagaatggcacaggagagctgggaaagaggatcacaattaattatgagaagtcagaaggctccatagaaaacgagagttgaaatgtgttccaccaggagagtgatgctatggaagtcaaagacaaacaatttcaaggaggaagaagtggtcaaaaaatattaaataagtattaaatgccagtgctatttatagtagattgtgtgacttacttagcgttcagtaggggcaaaatggaatacccacattgtatag

SEQ ID NO: 139228 - DNA, 1091 bp, Homo sapiens
ttcagattactgagaaatgcagttctcaaatttctgcgtaagttttgcttaattcattaaagcatatgcaactaacttgcaacatactttttttactgcttgtattagaaattctttttgtacttaatatttgtttaattacttgatccattagttcaattgtaaatgacttccttgttgaatttgttcattcagttttcatgatcgtttgaagagtaatctagaccagtgttatccagtagaactttcctgtgacagtggcaacagtcctgtatatgtgctgtctaatacagttgcaactagccacatgtagccaataagctcttgcagtgcggtcagtgtgactaagaaactgaagttttaattttatttaattataactgacttaaattttttaaggccacatgttgctagtggctactacattgaatagcacagatatatctactttattttcatttagttttccaagttacagtaagtgtattttctaggtaagtgttctaattttacaaactctttgaaacctatggtaaaaaaaaataataatgcaaaagcaaactctaaaaattaatttactaaactatttgtatttgatttttattgcatttatctgaaacattgggtggctttattgaacataccacagaccatttctcctcatttctggagacagtttcattctaaggagaaacatatgtcctaaagacccatgaactaatacttattttgagattggtccataaaaagtttttgttcatttttaagcagctgatttagaagaaagttttaatgaacatgaactggagccctcatcacctaaaagtaaaaagaaaagtcgcaaaggaaggccaagaaaaactaattttaaagggctgtcagaagataccaggtccacatcctcccatggaacagatgaaatggaaagtagttcctatgtaagtaaaaaaaactgttggattcttacttttgttgcaccatgaatatttcatttaaactatctataggtaaagttcatcatttgaaatgttaagtaagcttgaaataccgatagcatattttcatgattttttttaagttcgttttttctt

SEQ ID NO: 139229 - DNA, 1057 bp, Homo sapiens
aggatgctaataatgaaaaaccatttgaagagtttgagtaaaattgtttcatcaaatgtgagcagaaggcagcagtatagatagaatatatatttcctgaaatgtgattttaaattaaatatatgaaacaaatttatagaatttgattatttcatcaatatacctgaaggttggtatttttaagttggccaaaactttgcttttaatctcattgggcaaaatgaggaattgccttatgataactgtcatcctaaaccagagattttgtttcagatgaacttttattatctcaataatagtgtgttttcctatctgttagataaaaatgggtctgtaactaattggggagtattttttaaagtgtggatgaggaaacccatgttttaaatgggcactagcctcatccactaatgttggcaggaatgttcatcagcagtgacaaagcattttgagatttttgtctttcatcattgtagactatactgtaaaaatcatagtggaaatgatgagagagatgaagaagatgaggaacgagagagtaaaagccgaggaaaagtagaaattgatcagcaacaactaactcagcagcaacttaatggaaactaggtatgaaagttaattatatgggatctgttgtcaggatacaatacacactgatatatacatgttgaagtaatggtatgcagtaagattttttttaatcctattatgtttagttaagagcatgttactaaaatgctgaggattttgtaggcttgcatagtagttgttttttaactagctgattttgtaaccataaaaacaagctatctgctttatcaataagtgtagttgtaatgtcaaatcaataagatattcacactcctcaataacattatattgattgtgttcccctcaagcatcatattttacatttttttatcatcttttaaacaggttcatgggacagagttagaaaactgggaatgaataagacatccataactactattcttttttcactgttttctaaaatcaaaaagggtttgtaactttttactgcccaactcttagatcc

SEQ ID NO: 139230 - DNA, 1425 bp, Homo sapiens
ttaaagcagacgaaacgaagtaagctatatttctggactgaacaaagctctgctgtttagagcatttaagtttgtttagtggatccatactcaaaggaaagcataagcaaattttcctttacaatgcaaacatgccactggtggcagcacatggtaatttgtggatttttttttcatactcaagtaatggaggctagaaatgaagagaaccttctttttctcttgactttgacagcacatgctaaaaatctcttccaagaagtatgctaaagcttttcatttggttcctgttaaagttgttctcactgaccagcatggactcaggcaactggtaatgataagctatgagctccagtgcttttgccaaaattctcttgacagcacacctcctctctttccatgttatacaaaggacttctggcaaaatgattgagtccttcaagtttaaactaacatttggcaacagcaaattaaacgtttttaagatgtaaagaaagggttaccgcttgctaaggacttcagacaccatgtccgaaacctgttcctctcaagtgccctgttgtgtggaacacttcacatattggcgcacagtacgtaaggaggtctcatgtgctgtaggagtaaaaaagtctttgcataaaacagtatttatttttacttttgtgaccactattttagaaactttatttaatattttaatgttttcagtcattgctttggttatctataaaataggcttttgtgccctacttttcttcttgtagggcttggtggtgttttatcgattgtcagaattgtttttgaaagcctaagaacccagctttttagaaaggattttcacactggcatttctaggtagtgatattttcttccacttacctgctgaagcacatttatgcatttctttatggcaaaaccaaataactttagttgtggtctgcctgatactaccatagcacctcagtaccaaggggagggattttgactagttgaattattaagccaccacaataaagcagatttttaaataagaaataataatgttaacttgactgtacattgagatattctgcagctgatagagcagcattttaaaaatgtaacaggtggaaaattacactgtgcttaatgactgatttttttttaaactgcgagtcccttaagatcacgtttgtcaagtgtgtattcacacatttacttaaatcaagggactcaatgcttgcttttattttaaccatcttttactatttttagaaggaaactagctttagtagtgggttgccctgtatgttttctctttttgctcttaatatgccattgggtttttgtgtgtatgtgattttcaaaattcatgacttgaagtgcaaggacagatctagatgtttgtttaccaagctatgtgacttctcccaaaggatctgtact

SEQ ID NO: 139231 - DNA, 1631 bp, Homo sapiens
cccatgggacaacagagctccttcatttttggacaactactgtaatcattttttttttaggaaaaatggaaggtgccgggggtaatcatggccagtcaataattatataaaggagttcaaatactatagctgtcagttgatgaatttgttatgtagtaaaatgtatgactttgtatgggtttcttcagccctttttctgccactagcaaccagaatagcactttaccttttggttggctagataagtggctgactacctgtttttctcactgtggtgtgattggctaaacaatctcgcattaaaaattcaaatgtaaattgaattcacatgaaaaatcatgtttggttgtaaacctccaatgttttgattctctaatcatgttttcgtcacatgctgagtaaaagtgccttacaatgtaaaaattgtacagtacttatgttcccaagtagcatcatcatcttctgggtagtaattacattgtggtattaatatttagaaaaatggacctcagcagtgtatttactgtacatctcttaagtccttaactgtagttttaataagcatgacattatttgataagtatataacatttacatcatttcaaaaaatactgccgttactgtcttttatgcatattttagcctgaaattttgaagcgtcttttttctttcttttttctttttttgttttgttttttgttattgatattaaacagtgtaatctttgcaagcgtatattgaagattattctggagcatttattgccttaccagaaatgttagtaggaaatgttctttagagtagaaagatagacttgagtttctatacttttaagaagagctctttgttcctgggggaggggggcagggggtgaattttactttcatctcaagttattaaaaacccacaactgaagtaaattttatttcaagaatcagcagttttagaatttcagatagtacttgctcagaagtacatgctactcaagatattaagagataacaagatctgtagatctgctattgaatcagaatctgtgtacttgaacaaatgtgtgaatctcaaatatctcaaagcaaaagaaaaagtgttctagagtgttgttgcttttttaaaaaaagcgctgaagttagaccaaggtatacagttttgttctaacagacatttaggttaattgtaaagataaggaatgcattatgggtcaaaaatcaaacattcctctcatgttatgtatattttgttcctgttatattggctttattttcaaaattgtagtttgtagtattagtttccttttattggtattcttgcatatactattcattcaataaatgacttatgactttcatatttgtttgtcttttttgtgaaagtgtatactgaagcttatttgataacagcaatagtattgtgttccttttagtcttgctttatttcagagtaaaatgccttaataacttttcattaaacaagtatgggaggaaaaaaagtgtgaatttgaattcagttcaaagtttcacaatataaaagttttatcatggagagaaactgcaatcttgtaagtacaatcgaactgcattacatcttggtttttttattacatggttcagatgcccatcgtttaaatcaga

SEQ ID NO: 139232 - DNA, 1822 bp, Homo sapiens
catgtgccgcctgcgagcgtgctgcggggaggggccgagggcagattcgggaatgatggcgcggggtgggggcgtgggggctttctcgggagaggcccttccctggaagtttggggtgcgatggtgaggttctcggggcacctctggaggggcctcggcacggaaagcgaccacctgggagggcgtgtggggaccaggttttgcctttagttttgcacacactgtagttcatctttatggagatgctcatggcctcattgaagccccactacagctctggtagcggtaaccatgcgtatttgacacacgaaggaactagggaaaaggcattaggtcatttcaagccgaaattcacatgtgctagaatccagattccatgctgaccgatgccccaggatatagaaaatgagaatctggtccttaccttcaagaacattcttaaccgtaatcagcctctggtatcttagctccaccctcactggttttttcttgtttgttgaaccggccaagctgctggcctccctcctcaaccgttctgatcatgcttgctaaaatagtcaaaaccccggccagttaaatatgctttagcctgctttattatgattatttttgttgttttggcaatgacctggttacctgttgtttctcccactaaaactttttaagggcaggaatcaccgccgtaactctagcacttagcacagtacttggcttgtaagaggtcctcgatgatggtttgttgaatgaatacattaaataattaaccacttgaaccctaagaaagaagcgattctatttcatattaggcattgtaatgacttaaggtaaagagcagtgctattaacggagtctaactgggaatccagcttgtttgggctatttactagttgtgtggctgtgggcaacttacttcacctctctgggcttaagtcattttatgtatatctgaggtgctggctacctcttggagttattgagaggattataagacagtctatgtgaatcagcaacccttgcatggcccctggcggggaacagtaataatagccatcatcatgtttacttacatagtcctaattagtcttcaaaacagccctgtagcaatggtatgattattaccattttacagatgaggaacctttgaagcctcagagaggctaacagacataccctaggtcatacagttattaagagaaggagctctgtctcgaacctagctctctctctctcgagtaataccagttaaaaaataggctacaaataggtactcaaaaaaatggtagtggctgttgtttttattcagttgctgaggaaaaaatgttgatttttcatctctaaacatcaacttacttaattctgccaatttcttttttttgagacagggtctcactctgtcacctaggatggagtgcagtggcacaatcactgctcactgcagcctcgacttcccgggctcgggtgattctccccaggctcaggggattctcccacttcagcctcccaagtagctgggactacaggtgcgcaccaccatccctggctaatatttgtactttattttatttatttatttatttattttttgagatggagtttcgctcttgttgcccgggctggagtacagtggcatgatctcggctcagtgcaacctctgcctcccgggttcaagcgattctcctacctcatccccctgagtagctgggattacaggcgcctgccaccatgcctggctaattttttgtatttttaatagagacgaggtttcaccatgttggccaggctactctcgaactcctgatctcaggtgatccacccgccttgg

SEQ ID NO: 139233 - DNA, 1188 bp, Homo sapiens
caaagtgctgggattacaggcgtgagccactgcgcccggcctaatatttgtattttttgtagagatggtgttttgccatgttgtccaggctggtcttgaactcctgagctcaagcgatctgcccgcctctgcttcccaaagtgctgggattacaggcatgagccaccgtgcctggcctaggtagacgcttttagctttggggtgtgatgcctgccccagtatatagtgaatttaattattgctagagctggctgtttgttagttttctttgaacataagatactcattgtttttagtttgcaaatccctcttcctttttaaaaaatttctttcccttaaattgtttgcatgttagcaataacaaatgcttaaatggtgctatgtgctagatactcttctaagccctgttatgtatattaactaattttttaaattacacaaatcagagaggttaagtaacttgcccaagattacccaacaatactaggatttgaacctaagtttgtctcaccccagattctgctcttaatctctaaacttttaagttagtagtgacaatagtaggtatttattgaatacttaactatgttttaggcgttgaagtaaatattttgcaggcattatctaatgtaaacaccctaaagttacataacaggtaccctttaggtaaataaacactagtatgaccttggaggcacagatagttgaagtaacttgcccaatatcacttacatgaaattggccctcaaatgtgtctgatacaacccatgctgcttgtaactatcgttttaaactgccagggtaaacttggacacacttgagctaagaaaaagcttttagatttttgcaaattaatgtgaaagatatgctttatgtggatataatatcttctaaatttcggggatggtagtcctagaaatgtaatcctgccctagccgagcttaccctgccaataattttttacagaattggtaaaacggagcaccttttttttgtccttggccacactgttatcaacagggtgtagattgacatcaatctgtaggtgtaaaccagaattactctttgtgaccaccaggaaatagagcagttcagttcaggggtttctttctgtgaatttagcactgtgacctgcatactacaagtctactttgttttctatccattgtttgtatctgggtattgcaa

SEQ ID NO: 139234 - DNA, 1887 bp, Homo sapiens
cctgcacgtacccattgccaagttctgacaactgtctgtctatagccaattatgcatttcttaaattagaacccccccaatatacccaaatatatatatatgtgtgcatatatatagtaagttgtaacaaagttgtgaattcatacctgaagtatctcaagtgatgcaagttttatgaatttttgtttatgccttttgggaagagttgtattgacaaattttttatgcttaaagtaaaccataaatcaaaaaaataaaatctaggatgcaataaaacaaaacaacttcttgacataagtatggtatgtaaatctgttttgattggaaatcaatttgttatattgccagaattcctgttttagaatacatctctgctgatctgtctgtattcttagactgcatatctgggatgaactctgggcagaattcacatgggcttcctttgaaataaacaagacttttcaaattcttagtcgatctgcagaacctgtagccaggcactgaaccattttgatagatgcagtaatcgttgcaagtgtatatttcaaggagttctggctgggtcctagtttatgcttgtggcagaagcagtgagtaactgggaggaagttggtgagtaagcttcaaggaagaagtcatttttagtactctggatcttcctgattttaaagcactacaaaatggtgcattttcattcttgtcaagtgataacagatatattctgatgagcctgaaatgaatatatattgtatcatttttataatatctagcaaggtttgtattttcctagaacttgaactaaatttcagttcataaaatttataaaatacttagttgttgtaaaatatttttggaatgttcacataggtgacacacaaatgtcccattttcattctttctatagtaaatatgttctgatatgtgaaggtttagcagatgcatcagcatttaatcctagaggatctggcataatcttttcccccaagaatagaaattttttctgcttatgaaagtagtacatgtttctttaaaaacaaatcaatattgacttctgcctgctgtatagcactatgcctccacctggccatgaccaggggcatgtcctggtccacctacctgaaaatgtttgcaaccagcctcctggccatgtgcacaggggctgaagttgtcccacaggtattacgggccaacctgacaatacatgaagttccaccaaagtctgagaactcagaactgagctttggggactgaaagacagcacaaacctcaaatttctcagcactggaaacctcaaaatataactgaattccataaataagattttaagtcttaaatatgtatttttaaatgtattaaaagtcaagctgcttgtatttaagcacctaatacaatgcttaggttgtaaaaggagatgctcaataggtactaactgatatattgagatttaattatggtttgaccaatatttattggaaaccgccaaagcttaaatcatcagcttcttgaatgtgatttgaaaggtaatttagtattgaatagcatgtgagctagagtatttcattctttctggtttatttcttcaaatagactttgaatataatggtgaatgggtattataaattaactaataaaaatgacattgaaaatgaaaaaatatatatattaaagtgtagaaagtgaccaggcgtggtggctcacacctgtaatccaagcaccttgggaggctgaggcaggaggatctcttgatcccaggagttcaagaccagcctgggcaacatagcgagacttcgtctctaaaaaaaaaaaagagagagaaaaaaattttttttatttaaaaaaagtgtagaaagtgtcaagaccccacttcttaccattatttggtatatt

SEQ ID NO: 139235 - DNA, 1057 bp, Homo sapiens
agagtcttgctctgtttcccaggctggagtgaagtggcgcattcttggctcactgcaaccttcacctcccaggttcaagtgattctcctgcctcagcctcccaagtagctgggactacaggcatgtgtcaccacacccggctaatttttttgtatttttagtagagacgggatttcaccgtgttgcccaggctggtctcgaactcctgagctcaggcagtctgcctgcctcagcctcccaaagtgctgggattacacgtgtgaaccaacccgcccggcctgttgttttcttacataattcattatcatacctacaaagttaacagttactaatatcatcttacacctaaatttctctgatagactaaggttattttttaacatcttaatccaatcaaatgtttgtatcctgtaatgctctcattgaaacagctatatttctttttcagattagtgatgatgaaccaggttatgaccttgatttattttgcatacctaatcattatgctgaggatttggaaagggtgtttattcctcatggactaattatggacaggtaagtaagatcttaaaatgaggttttttactttttcttgtgttaatttcaaacatcagcagctgttctgagtacttgctatttgaacataaactaggccaacttattaaataactgatgctttctaaaatcttctttattaaaaataaaagaggagggccttactaattacttagtatcagttgtggtatagtgggactctgtagggaccagaacaaagtaaacattgaagggagatggaagaaggaactctagccagagtcttgcatttctcagtcctaaacagggtaatggactggggctgaatcacatgaaggcaaggtcagatttttattattatgcacatctagcttgaaaattttctgttaagtcaattacagtgaaaaaccttacctggtattgaatgcttgcattgtatgtctggctattctgtgtttttattttaaaattataatatcaaaatatttgtgttataaaatattctaactatggaggccataaa

SEQ ID NO: 139236 - DNA, 1199 bp, Homo sapiens
ctacagtctctcttaatattgtatattatccaagaaatttcatttaatcagaacctgccagtctgataggtgaaaatggtatcttgtttttatttgcatttaaaaaaaattatgatagtggtatgcttggtttttttgaaggtatcaaattttttaccttatgaaacatgagggcaaaggatgtgttacgtggaagatttaaaaaaaatttttaatgcatttttttgagacaaggtcttgctctattgtccaggctggagtgcagtggcacaatcacagttcactccagcctcaacatcctgcactaaagtgattttcccacctcacctctcaagtagctgggactacaggtacatgctaccatgcctggctaatttttttttttttgcaggcatggggtctcactgtattgcccaggttggtgtggaagtttaatgactaagaggtgtttgttataaagtttaatgtatgaaactttctattaaattcctgattttatttctgtaggactgaacgtcttgctcgagatgtgatgaaggagatgggaggccatcacattgtagccctctgtgtgctcaaggggggctataaattctttgctgacctgctggattacatcaaagcactgaatagaaatagtgatagatccattcctatgactgtagattttatcagactgaagagctattgtgtgagtatatttaatatatgattctttttagtggcaacagtaggttttcttatattttctttgaatctctgcaaaccatacttgctttcatttcacttggttacagtgagatttttctaacatattcactagtactttacatcaaagccaatactgtttttttaaaactagtcaccttggaggatatatacttattttacaggtgtgtgtggttttttaaataaactccttttaggaattgctgttgggacttgggatacttttttcactatacatactggtgacagataccctctcttgagctacatcggtttgtggggagtcaaaagtcctttggagctaggtttgacaaataaggtgggttaacacttgtttcctagaaagcacatggagagctagagtattggcgaattgaagaaatccccctttttttttaacacacttaagaaaggggactgcaggtatactcaagagagtaagtcgcaccagaaaccacttttgatccaca

SEQ ID NO: 139237 - DNA, 3184 bp, Homo sapiens
tattagcttccatggtggctataggccaggcaagagagttaagaaaaaataaatagccaggtatggtgactcaagcctgtaatctcggcactttaggaggccgaggcaggaggatcgcttgagtccaggagttcaagaccagcctgagcaaaatagtgagatcctgtctctattttttaaaaaagccttggggcaaacaggagtatggaggtttggatgctaatagaacagcagtgtcttactgcttggagttctcttgtttcttgtcctatcaccgtagcctttggatcacagcaatttttccatgactccatacttttcagttcttgaatattttttcctttattcctcttgtctctgtaaagacatcaactggagttggactgtaataccaggtatctccagaagatggcactatttaacagattttataaataatttgatgtgagtcactgtcatctgaagcttgttgccttttctttctttcttctttcttttttttccccatcaattctgtatgtttgaaatgctgggttttaagttagttagaataagggatgtctgtaatttccctaaattgagaagtaatatgcaaaggttgatatcagaagtcatatgctcaccttgcaacaccaaataatactggcccatttgtgatttttgaaagtaacactccataataaatggatgtatatatagaagcataacaaaaatagaagcacataaaagtgaaaagtctcataaacgccattgtcactactcatgtaattgctgttacaaatttgtttaaatgttgaataaaaatggtgtcataggcaacacagtgttccactacttggtgtttttaatagcattattctgtctcagtgtgctttggattatcaggtgctttttaatagttgcatggtattacattgtgtagatgaacttgattaatttaaatggttccctgttaatggacatgttggtttgtttttgtgaacaactgatacagtgaacatttattttttaaataaaaaaaagagagacagggtcttgctgtgtttctcgggctggccttgaactcctggggtcaagcgatcgtcttgcctctgcctccctgggattacaggcatgaagccaccgcacccggcccagtgaacactcttgaatgtatctttgtatacttgtcagtgtttttgtagcattgattcccagaagtgggattactggattaagtgacatgcatgtttgcaattttaacaggtattgctatgtcattttcaaaagaagctatgccaattaatactctcaccaacaagagtgcttatttcccctcagcatattatcaggcttaagttttgccagtatgggtgggagaacagtagaatcacattgttttagtgtttgtttctcagatagatataattttacaccttataaccttctcttctataaattgtctatttgtgttcattctccattttcctatgggttcttattgttggagcccaatatataaaagggggtatttgttacagaacctcttcagttttggttcatgtcatgcctgggtttttaccctttctacggatgttaaaaaaaattctctattttcttccagtccacttatggctttattttttacatttagattttaatccgtctggaatttatttttgtgtatgctgtgaggtagggaccatacttttattttttcccaaatgggttactagttggccaaacatcatttattgaataattcatcttttccctactgactcgaaataccatctttattgtatactaaatcctcatatagttctgggtctgtttctgggctctactttgttcatttactgtgctggtactgcaccgttgtaattgctgtggctttgtggtatggtatggcttgctctctgctagggcaagtcgaagctcttttgttcacctgctctttcacccaaattttctgtcctgaatccagcacagccaaattatggtcattgtcaccaccaactacagtgggtgttgagcatttcccattgaatctcctgtaagggttttattggattctgtgatagcagtaaaatgggagcctaagaggtattccttaaaggactactaatcagacctggtttcccagatgatgctgaagatgacggggcctgggctagacttttgagggacatatccttggggttgggtgtgatatagaccagcccttacaatttgcttgactcatgggaatcgtacagggccagaaccagacacctgtcatgctaataacttccctcacaattcagaaatcactgtgattgaagatgggtggctgttataatactacccacttaaaaatggatgtaacccattttttaggactcttaaaaacatcaaatcagtaatggccgattaggactttttaatttttactaatctctacttgaaagttttctagtcattcatttcaggaaacctaattcttataattcatatcatttagaatatcataatgctatggatattagctagctaacttctcaaatcttctagttctcatttaatttgaagtttgtgtgtgtacataaggatatacatatacatatgtgtgtgtagatatatatatatatagttttttttttttttaactagaatgaccagtcaacaggggacataaaagtaattggtggagatgatctctcaactttaactggaaaggtatgtatcttgaaagggaagaaaaaaaagcacttcataccgagtcaattagtaacagtgtgctttcaatcaatcactaagagataatttacatagtataactaaatgggttatttaacccttggaagcagtctaggttaattatcgttccctaggtcatgtagtaaaaagacagtagaatccaacattaaccttaaatgtccatattgtcaagtactgctgtctgcctctgtgggactctaatttgggatccttcaaaaaacattgatgggggaaaagatagcctttaaaaaaaaaaaaaaaacaaacctatgtgagtctatgtgaggtagactcacatagtttcctaaaagatagcaaagcagtattatgtagtggctgaaagtgtgagttccggagcctgacaactgattcaaagcatggcttagtacttcctaactctgaccttgggcaagttacttaacctctctgtgtcccatatgtgatt

SEQ ID NO: 139238 - DNA, 1112 bp, Homo sapiens
tatttatttatttttgtgatggagtctcactctgctgcccaggctggagtgcagtagtacgatcttggctcactgcaacctccccttcccagttcaagtgattctcctgcctcagactcccaagtagctgggattacaggcgcacgccaccatgcctggctaatttttttatctttagtagagacagggtttcaccatgttgaccaggctgatctccaactcctgatctcaggtatccacctgcctcagcctcccaaagtaccgggattacgggtgtgagccaccctgcctggcctcattttgtcttttgggggtatttttgtgtgcagatatatatgtatataaatatttttccctcttttccccagttagtatttgagcagatgaactttggacccgaatacctgtattcaagtctctaataccacttcttggctattttcattttatcaaatggcctcttatcctcgtttttctcatttattaagtagagatgtaactacttgatataattcaaaaactcaataatggcattcttttgttttttagactctagtgtctgtactcgttgtaccatgctgggattcatttgaacaattgcatggcttttttagtgtattattaaatttgcagtttacttagaatttactgggacctcatacaaatgggaaaaaaacataactgtgttactcatttgctgtgtgcctttggattgaccctattttttgtattcattttctccccatgtcctgagttccactttgaataaaaagtaatttttttcctgcctgtaaaataggctaccaataggctgcagttgtctatagtagctgcttcactgaggagagctcagcatgagagaaatagtatgaattgcttgccacaagttatgggctagccttacttcattctgtacttggacctgtttaggcttctaagagatcttacctccaacaataaactgctttgagacatgaaaaggtggaagctttacttggttataactttacttttaatacctagaacagtgagtcttcaaacttgtatttgcatgcccaatttataaaaagtttcctgagcatttacccctaatatatgcattttaaattata

SEQ ID NO: 139239 - DNA, 1091 bp, Homo sapiens
aatatatacatatatatcttatattttatgtatatatatatatatcttgcttagattttgtcttatgtaatatttggtacataaaaaataatatttataatttatagactattttccatgtgttattatgtgctaaagtattttgtatcttagcaccgagaggctaagcagtttcctagggttaccagctagtaaactaagggaaacctttacttcctttagctcagtggttctcaaaatgtggttccctagaccaaaagtattaatatcagacaagaacctaccgaatcaaaatatctgtgatgaggcccagcaagctatgctttaacaagtttccgagtgattctgatgcatgctaaggtttaggatcccttgtttttactcataagtcactttctcattaaggccttccctggccatcctatataaaatctcatgttttcacaccgtcaacttcgtattcctcctcaatacttttattttcctgatcacttatcactaacagcctctctctctctctctctctctctctatgtatatatatatatatatcacttatcactgtctaacagcctctctttatatatatataatctatagattatatatatatgcagcattgtgcaatcattatcacgctcaattttaaaacattttcattgccccacaaagaaacccaatccccttagccatcactccccatttccccttcccccagcacctagcaaactgatcatctacctacttgctgtctataagatttgcctattctggacattttgtataaatagaatcatacaatatgtggccttttgtatctggcttctctcacttaatgttttcaaggttcattcatgttgtggagtatatctgcactcatttcctttttattgccaaattgtatggatagacaggtgttcctcaactgtgtcctgataaacccatctgaagttgaaaatatcataagttgaaaatggatttactactttgataaatctatcctaaagtcagaaaaatctcatgttgaaccatcgtaagttggataccatctgaattacatttttgttatccattcactggttgacagacgt

SEQ ID NO: 139240 - DNA, 1320 bp, Homo sapiens
aagaatgacagtattgcagttatacatgggggttttggtactttatattgtgactctgaatttaaagctatgcaatgtcttcttttttgaaaggatataattgacactggcaaaacaatgcagactttgctttccttggtcaggcagtataatccaaagatggtcaaggtcgcaaggtatgtatgacattttgacacagaatattttcctcatttgaagggggattaagtgattgcttctttttaaggataaatgttttcaactgtcattttatcttcgaaaagtaatgtaatctcatataagacttaagatataatccttttaaataattttgtcatgtgttaataaagctcataattacagtcacttccttgcctaatattaacatttggtttttcagcatgctaattatatcagtttgtcctgaatagcatggcagaggattttgggcccccttgcaaaattaagaataaggattccaaagcgggtgaggaagtgataggaaggggtgggccctgaagatctggacctcctggaattgagtgatgaatgctgcatcttctttgtgtctgtagtgaaattttataatgcctgcttccttttttattaagtcggcctcacctcctcaccttacctatgctgttttacttttgcttttatagttctacctgtgtttatttctcattttcgtttcatctctcaacaactctggggtggcattattattcccacttttcagataaggttactgaggcatagggaattgtccaaaggtacagagctagtccgctatagagatgagatttgaacccagggaacctggctcacagtttatgcttttgctaccttaagtttttaatagagtgacatcaaacaaacatttaagaatatgtttttcttttccttttataatttcattaaaaacattaagtctctgatcagtctgcagtttttatgtaggggtcaggtaatgttctaacttctgctttttcctaagtgattaacaggtttttataagcccttttgaaaaaatcacggtatctgtcgagcatctttgaatcagagtaagccttctagtgagtcatatgtcagcagtttgactgtatgggcttttctaatatccagttcaagtgtttatcagtgagtttttcttttaaatagatttgggacaggtactatgagagtatataagtgatacgttataggacactaactagtatcctatgaaatggcaaaaactgcaatcacttttgcaccaaccaaatagaaactaatcagtgcacttgcttatttttctacatgctctttagggttttaaat

SEQ ID NO: 139241 - DNA, 1046 bp, Homo sapiens
tggacacatgggtagtcagggtgcaggtctcagaactgtccttcaggttccaggtgatcaaccaagtgccttgtctgtagtgtcaactcattgctgccccttcctagtaatccccataatttagctctccatttcatagtctttccttgggtgtgttaaaagtgaccatggtacactcagcacggatgaaatgaaacagtgtttagaaacgtcagtcttctcttttgtaatgccctgtagtctctctgtatgttatatgtcacattttgtaattaacagcttgctggtgaaaaggaccccacgaagtgttggatataagccagactgtaagtgaattactttttttgtcaatcatttaaccatctttaacctaaaagagttttatgtgaaatggcttataattgcttagagaatatttgtagagaggcacatttgccagtattagatttaaaagtgatgttttctttatctaaatgatgaattatgattctttttagttgttggatttgaaattccagacaagtttgttgtaggatatgcccttgactataatgaatacttcagggatttgaatgtaagtaattgcttctttttctcactcatttttcaaaacacgcataaaaatttaggaaagagaattgttttctccttccagcacctcataatttgaacagactgatggttcccattagtcacataaagctgtagtctagtacagacgtccttagaactggaacctggccaggctagggtgacacttcttgttggctgaaatagttgaacagctttaatatacaataattgttgcattattatttcagatgataaatgtggtcataagtaagaaataaatgatcgagtttagtcttttaattcactgtcctttgaatacctgcctcttactctggaggcagaagtcccatggatgtgtttatgaacatggttgaggaagatttaggaagactgcaacagtacactacctaaagcaggttttttactccatctttttttgccacgtacactggcctcccactttgatatgcttg

SEQ ID NO: 139242 - DNA, 1420 bp, Homo sapiens
atagaaaaaattagctggggtggtggcgggcgcctatagtctcagctactcgggaggctgaggcaggagaatggcgtgaacccgggaggcagagcttgcagtgagcagagatcgtgccactgcactccagtctgggtgacagagcaagactccgtctcaaaaaaaaaaacaaaaacaagaaacaaattaaactaatgtgatagactactgctttgttttcaaaagatacactccccaaaagttactgatctaaaatacagtagtactatctctgtttagtaagaaccctgacaactaatagtgttcttatatgtaaaatgctattcttgcctttcatttcagaatatactttttaaatgtgaatttctggatttttttttatagcatgtttgtgtcattagtgaaactggaaaagcaaaatacaaagcctaagatgagagttcaagttgagtttggaaacatctggagtcctattgacatcgccagtaaaattatcaatgttctagttctgtggccatctgcttagtagagctttttgcatgtatcttctaagaattttatctgttttgtactttagaaatgtcagttgctgcattcctaaactgtttatttgcactatgagcctatagactatcagttccctttgggcggattgttgtttaacttgtaaatgaaaaaattctcttaaaccacagcactattgagtgaaacattgaactcatatctgtaagaaataaagagaagatatattagttttttaattggtattttaatttttatatatgcaggaaagaatagaagtgattgaatattgttaattataccaccgtgtgttagaaaagtaagaagcagtcaattttcacatcaaagacagcatctaagaagttttgttctgtcctggaattattttagtagtgtttcagtaatgttgactgtattttccaacttgttcaaattattaccagtgaatctttgtcagcagttcccttttaaatgcaaatcaataaattcccaaaaatttaactgctttatgaattcaatttaaaaatccttaaaataagtcctgtctctttaaaaaaacctatgcatagttatcatttctctacaaattaacctagtttagttttctgttggttccattttccttgtttgttaagttttagtagctagtttaattgtaatctcaatgattatgtggtagaatgggttggcggagctacaaaaattcctagctacttcagagacattaaatttcagacacatggtacactttatattacattttactatgctaaaataacacggctttcttttggaattctgttcagtttttcagattgtaatctcagctacatctcaacagattgttctcagatatgtcctattaccttctttgtgtagatagtgctttattgactaa

SEQ ID NO: 139243 - DNA, 1046 bp, Homo sapiens
tatcttcagtccccacccacgaaatgctggggggtggggaggactggaaaaggagtaaggggagaggaagggtgagcagctgcaagaagtctttacacctctctgcggttcctggtaaacgcgctcatgtcctgggtatggaagggacttaagaattcaggaaagatcaaaataacgggcctcttccccactccctcgccctcccttccccgctgctggggggttagggaggctccgtggagctccagcactctagaaggatcgggtgaggcgcgaggccttgcgggcgggtgaacccaaggtggggtggaaggctccaacccgcccaatctgagcccgaggcctgctgagaagcatgggggccttgggatagttccagaatgaggatgtgcgtttctagctgctttgcgccctcctcccccaaaaatctgctaccacaattccaacccggcggcacgcccccaagactcctttgtcgccccaggggcgggacctgagctgtcgatttcaggagcccttcgtgacttcaaaagtcctgggcactgttgctcatgagtgctgcacaactgtcgccctctaaagccacctccatccctcactgggctggcctcctgagccttcggtgaggaaacggggttccgagttgcccgcctgagagcttaacagtctgactagaaaagggctaattcgctttctgtgcaaatctcttgagctaattatttaatctgaaacatggacaggtaaaggaccattggcgggcgtggggagggaggtgtggaatctttcccacactttttgtcaccttaaagaaaaaaaaaagacacccaaactcctctggtctgaatgggctgcctggaactgggcttcccggggccaggagtgggcccctagaagtttcccagtttggggtggggccggggttccgaagtctagagctgggagtcgggttcagcggcccgagacgctggctctcccagactcccttgcgccggggcagtgcgcgggggcggctcgggtccctcccgggccggcggggaccctcaggc

SEQ ID NO: 139244 - DNA, 1033 bp, Homo sapiens
gacatgcgattttttaaaaagggacttggtggctggcgtctttcccgactgtaacgtgggttacggcaggcagaaaaacatctggtgataattctgaaaaaagtgctgtggcgtttgggggggttgtaaagcacgttttgcgggcgggatgggggcaaatctgacatttaaagtgtttaacaaatgagtgcggccgggaaattctcaggaaacggactgggaaaaaaaaaacaacaactaacatggaggggcggggagagaaaactgagtaaggggcagtgaccgactgtcagcctcgctagggtcgggagcgactggttttgacagaatgtaaatgaacttttcctcttatttgcaagaagttagttatgtcttggaaagaaatgtgtgattaatttcacattgtctctcccgaattaaaactttaaaggttgtttagttttccccgtagggacttgacattgtggaagtttggctagaatgcgccgagagaaggtacatcgtgtgtttggggtgtgggggacgaaggcatatgcaaaattaaaagacaaaacgttgtagagtatgaacagaggaagaggcgtattctttggctcttaaatcatttagccaaacacattgcagttcagaagggggtggggctatggcaactcgaaagtatcgattctttgtctattgtatcagtgaatgaccctctcctgaagtgacaagacgcccctttgtaatctcttttcgtaagtaaatttcagtctaaggggaaatatgtaaactaggggatcgaggtggctttttaggggtgtaactcgttgtactatcactgggagagatgaaaggggttagggtgaaaggtataaatgaatttgattccaagagcaatctggaagggaccttcgcctttgacaccgatgctgtttcgaatgaacttttgtttttctaagtagtcaactaaggaaatgttaaattaggcatgactttaacttctgacatgatggctcgtatatttgtgtggaacaaaatgttgggagaaagttgt

SEQ ID NO: 139245 - DNA, 1047 bp, Homo sapiens
aaatttgcagggagaagaaacttaagtagttctcacaaggatgttttgcacagtcattaagactacagttcaaaccccagctttccacctattagccaccttgccttaatcaagtccctcaacctctcttcccatcactttccttctctgtaaaatggaggacaacaatagtacctcacttttaaggacactgtgaagattaaatgagattatgtatgtaaagcgtttagcacagtgccggacacataggaagctctcaatacataggagatgctatcattaaaacaggaagagtttgtcctaaatgaatatcaaatgtttcatctcttataagctaaaaactacttgcagcaattaaacaggatttctccacccctagtttctatccagcaaagtttcaaacatgtcagggtcttagttttagcctggggctcccaaacacaattgtgcagatgtttgtatataaggaaatatatctatatagaaacatacataaggaaatacacagtctccatacaagcctctctaagccctggagccacagggcacttcatccagcaaggcaattcaatcacaacaaagtcatttttatattcctttaaagttcgtaaaaacaaaatcctccttttccagccagatgaatgtattggtacctttgctttgccctgcccctgagccggagtagctgaatctgtgctgaatccagcctctaagagcaaccttggtcaagtgcatggacccccagggggtcctattatcccatttgtacttgagggtatatggggattgggccaggcatgggtttctcaggcacacatagcaggtagaaatgatgcttcagagcctcagaggggtctccacatgaaaccacctcactcatatttctgaaagaaatgctcaaatctgagatgggttgggtggctaacactggtaaccccagcaactcgggaggctgagttgggaggatcacttgagcctgggagttccagatcagcctgaacaacatagtgaggccccatctccaaaataaaaggaaaaacctcaaat

SEQ ID NO: 139246 - DNA, 1021 bp, Homo sapiens
gaagcaatctctccagcctgagggtctcaggcaggacttggcctggtgggtgactggggccaagtgggggatgactggcaggccgagggcatgaggaggacagaggaagaaaggggggaaaaaggtgagggggtgagagactagaaagtgaagggaacaggcacagaagggagagaagagggacgccagagatgtttggagtagggacagttgggagaacccatggcgctgacagctccgcatcttgataaagtcatttcctgtttatcagacatcattagggcattagagttctcataccaaagatttatccaagagtagacatttggcccctttgggtatcaatccttttggaactcagtttcatttttttgttgtttttatttgtttatttgtttgtttttactgtgaatataccttatttagtcatttttgtttacaagtgaaactctgggaattcaaaattaacttcgttacctatgagcttcttaaagacaccagaaaagtttcaaccttgtgtgccacattgttctgctgtgctttgtccaaatgaacttttgcgaggcagctgccatccagtttcaagtggattctcttgcccacaatttcacttggaaagaccaagtcctcaagatcgcatggtacgcagctatcagagtacagctcctgtgatgcttttgcttattttttgtatggctttttcaagttggcttaggcagaattctcctctgagcaataaagacaacatgcttctcactgaactttttctccaattcacatactagccagacttggattttctgggaagatttcagtcgagaaacaggaacaaagattatgatagctttctgactaccaccaacttcagtttccttggctgctgtgatattcagctccctgagctgagccttgaggtccacgttcatctttggctccagaagagcctgggagatgccgaacttgaacttgtctggcttcttgccgttgggcttcgtgatcctagtgttcaaactgaacgtgg

SEQ ID NO: 139247 - DNA, 2865 bp, Homo sapiens
ttaaagttttacagatttcacacattctgatgctattattactctttggcatctctcttctccaaagttcaattttgtgagcctagtgaccttactagtatctggttttgctgatctcattttggatttagtgattaaatctcaaatgctgatttttgattgcttagaggaatcttttttcttagtgcctcaaaaaacacctattttgagtctatacatttaagaaaggcactgatgtgtattgcctttaatggtccttttccgcagcagtgatatgacagatttgatcagaaattctcttgcttgagagatttttttttgtcctctgttgactacatagtttcaaatctctctttatttcatgatgatatataaattgcttttaattatattaaatttttatttttctgcatcagcttcaagtacattattttgtttccctttcctgtttgagccgcttatgccatttctcacagaggggaagaaatacgtagttgctttcattactcttattgcttctttgctgttggggtgtgtgaagtgagcattgattttagtgctgagaatgtaaacggacttacaggatgcttggattagtcatcacaggttcttatgactttgctaccacagttgatatatttctcctcaaacctgttgccctaaggaatatataaaatattgttgatatttctaggtggtgttatcaaggagaagaaattcctgccttgaccagatgtgtggagcatctacaaatgaatgaatagttatttacacacaaaccactgtgtacaaaagcgtccatggagctgtcagtgtctcgagtggtattatgaggcctcaggtgccttggggtacattgtcatgctataagggatgtatatcataaggtatggtggaagaggggccttatgtgaatgattgccacatactgtttctgttgctgctttttttccgattcctttttgtcattggatttgtttgttttgtcatgtggtgaatggtgttttagttattgtgttgctgccagaatcagaatccagttcttgttcttactgccttatagttattgtgttgccaccagaatcagaatccagttcttgttcatactgccttgtagtgagggcagtttaatatctacaaagaagcttttagaagctgaaaaagtcaatgtgattgtgcattctgcttttaagaagctgtttcagctatgaactgtgtatgtgctataagtgtgaggtaccataagttatttaatttttaaaagaggaaactcctgagtgagctgtttaagaaatctgagtgtgatctattgttacgttatttataactaggtaaaatgtctgtcgtgatagatttcttttaacgttcagatactgtggttgggttgtctatatttaatatgcagatttgcctgctggaatcataatccatttttaagtgaatgtaagaaatgaaaactactgcatttgtgtcttttgaaggcaaggatccttggattttaaaggaagagtatgtgctttgaaggcactcagagactagtaatagcatatggtttgaagggaaacccattctctttcaattacaagagagcatcacttagcgtgcagtacttctgttacagcatccgatgtgtcctttattttaaattgtaaccataacagccattaatggctttatttcttgtattgctctcatctgggaaaagtctctacttcttcaaacgtaacataaatctattatgaagcttgtcccctagtatgccattataaagaaaaaattcttcgatggtatgcagtgtatctattctgtttgtaaaagatcatgtcaaaatgttctgcctctataatgataatagatggttttgtctttcaggatatttatccacctactgtcttctttgccttaaagggacacttggccatcatttttaggctcgaacttaacactgttaagaaataactgaaatatgatggtatttacattaatttttgaaattcaatggtgggatagaattaggtcaggaaatggaagttgttccaatggtgtgagaactaggagacaagatgattcactttattatttaaaccaagcttcatttttagtttttgttgtttaaatggactggaaagttaagtttttgcagggattgttttgaaataaagagatatgctaactcacagatgaactttgttaagacccctttatttttatataaagtctaatatttgaaaagcgattgttataaagtaaaattctctcttcctattctaatatatatcatatatttcaggcttctatttgaaaacaggtataagagatgatatgatacaaccctatagataatgttttttgcttgattgacttatataatcactgtttcatgattactgcttttggaataataggaagttttgtgaaatgctggccttgtgtatatcttagaatgcaaatttaataaagtgtgtatacatgcataaaatttactagtgttttaaaagtctgtcctttgttcttaataataattattttctgcccctatatcccagtagtttattctctgtgtctaattgcaggtcaagtttgaataaaaggatatcagaaacacaaaagaacgaatagctatgttgaagttggggctgtttgccaaaacgaagtgaaacctctccacataatcaaattttcaagagtattttgtagaatttgacaacttagaaggttcttgccagggtcatacatctttcttcctcgttttcaatttggtttatcttgttaaaatttttacatattgataagcctctataaattatttttagaaaaagatgagggtagataaacaggcaaaagggtccgggcacagtggctcac

SEQ ID NO: 139248 - DNA, 1858 bp, Homo sapiens
gtggtattattaatgatgcatttgacagcagtgagcgtagagtaggagtagtgtggaatatactgtttccatttttacttttacttttctgaagcctatttgtagtctgtctccatctaaaaacaatccacaagcaatggaatgaaatgacattttaaagaaaagcagaagagtagagaagcaagggtgggggtgatatatttcactgagggtagtacagggcccagaaactttctaatgtaccataggttacttttaacactagaagtacattaacttggacattcagataaatgataatattaaagactcctaacatttcgactcagagcatgttagactggaatgggctttttcaaaggagctagtgaccaaacttaaactagaacccatgtttcctgattcataattccttctccaattcgatgcttttttccttttcaaaaataaaaagtgtctgtgtaaattctaaaactgcccaattacctctcctgatttgtctgtcactgattcctggaactacccttgcttcctcccaaatcttaactagttaatacctgctcatccttcagattatagcaaatatcatctctggggaaccttttctcattcctccgaattaggttaggttacccatgttatatattctcatagccccttgtatctttcctttatcacttttactgcaaattataattatatatttattagcatgattatttaaatgtctgtctcctgcacaatactgtaaattcaatgagggctgggaccacgtctgttttaaacaccattgtatttctaatatctagtgtgcttcctgcacttggcaggcactcagtaaatattagaataagtgaatgattgaattcagggcaaatataaagcatagagcttattactggattgatggaaaccaaagccagaaaggcagcttgatgccagactgtaaaggctctcagttccttgctgaagtatggagccagattcatgagtcaggccaggttgatggttggggaacagtgagcccccaggctggatagggaaggaatccctgggctgggtatagaggttcttgatgtccagatctggagttttactggaaggataggaacaggagccagttgtcaggataaagaggcaatagacaacgggtattgagaccacaagtgtagattattcattgtagaagcttaactggagaataactgaagggatcaaagaaagggactcttctagaaatagacctttgggttttgaaagcaagaagaaaggaaatagtgtaaggaattataaatggcatagaattggagggggaaatcatttaaaaaatgtgtttgaattgaaggccctttgggaatggggaagtgataactctaggggagttgaaagactttgttttagagtagaggaactatgaggcagtgtacttgatcgaacacctctgatagtccgagtatggttacctcaataagtaaccattcctcttgctccaagcctgatgggaaggtaaacataagaatagaaatttcttgagctgaagtgaagtgaaggaactccctcccgaaaaccatggcatgtcacgaggaacgtttattgtaggttaggcggtctggtgcctctaggggggacaatcaaatgatacaggacctcgaagagtcttactttggatttctgtggctttataatgtagtatattatgtagttcattgctgtggctttatgcttttttattatttacaagtgatttactgatttgtgagctcttgaaactgtgtcattgcatgttatgtttaccctgatagttgcatttgcttataattctttttgctttgtcttcagttcagatattttggatggc

SEQ ID NO: 139249 - DNA, 1042 bp, Homo sapiens
tttgttattactttatcattggactgttttaatgagttgctcatacttcatccttagtttttctagacagagggcattactttaagtcataagtactttttttttttttttttttttttgagacggagtcttgctctgtcacccaggctggagtgcagtggtgcaatctcagctcactgcaagctccgcctcccgggttcacgccattctcctgcctcagcctctccaagtagctgggactacaggcgcccgccaccacgcctggctaattttttatatttttagtagagacggggtttcgccgtggtctcgatctcctgacttcgtgatccgcccacctcggcctcccaaagtgctgggattacaagcatgagccaccgcgcccagccaagtcataagtacttttggttgtgtgattcaaatattgcctcaatatgtatattcagtggctggaattaatttgttcagttttgattcaaggattcctatgtccaatttgaattgtccagatccttttttactgttgtctggctttcggccattagtctaagtaaggctcattagcacttccatcagagcttaagctaggaaagaaagaagagataaactcaaattagaccagaacttgttgcttttagaagctctagtagaagatttaatagtagactgtgaaaattacttttgtgcagtgatgttgctgtgggttaaaaaatcatgtaagtcttacttgacatggatagaataacaatgagtgatttgtgacgtgaagtctctgcttccatgaccatgagtagttgtaccagattaattcaaacagaaactagattttagttaagtgaaaatgtctggttaaagatttaccaagttctgaatctaaattgcagtggaaactaaatgtaagtgtgctattttctgttaatgaacaaaattatatatatttatattttaataatagggaagacattctgaaataaaatgttcagggctttttttttctgctcctcaattagcttatttctcttaaggtaatcagcagtgttag

SEQ ID NO: 139250 - DNA, 1041 bp, Homo sapiens
gacactgacttcagcacttttcccaaatgaatgtgaagctacgtaaatttagagaaataaagactatgggccttagaaatatccattatcccacttatctaaaataaagaacaatatgagaagggaaagaaaaaaaaacaccaatgttattaatttttattatcaatgcagcaatgggggaagacaggctaataagtctagtatataatattttgtctatgattgatgattttcaaaaacactttaaaactgcaataaggaggttttgctttcacgatccaaatccattctaaaatctcatcatatgctatcactacaaatcttactagttaacaaaaaacaatttggaaagacaaggtgtatctttaaaataactgatgctttcccttagatcatcattttttaataacacaaagcagaaatgatttggaggccaaattatgttccttcacaataattacaagctggtcacaaactgtaagacacaattcatatcaacaggtcttagagagttctagtggtcataatataaacgactactatttattctataacgaaatgcaagtgaacttgtaatactataaaaccaaataacaattatcctgtttaagaggccctacactattaaaacttatttgaatactaatgtagtgagcagtataaaatagtgataaaatgctctaagtttctttttatttttttttgagacagagtttcgctcttgttgcccaggctggaatgcaatggcatgatctctgctcactgcaacttccgcctcccaggttcaagtgattcccctgcctcagcctcctgagtagctgggactacaggcacacaccaccatgcccagcgaatttttacaaccattaagggagactggagtataagataaatgtattttagtagagacggggtttcatcatgttggctaggatgatctcgatctcctgacctcgtgatcctcctgccttggccctccaaagtgctgggattacaggcgtgagccactgcgcccagccactggtgaactcttaataagat

SEQ ID NO: 139251 - DNA, 1088 bp, Homo sapiens
cttaccctctgtcctcctccctcccctctgccctctcccttcccctccctcctccgcccccttcctctccctttcccccctctgccctcctcttatcctctctgtcctcctgcttttccacctatccttttccctccctcttccctcctccctccatccttgttttccctccatccttctttccttcatccttttccttcattctgtcaccttccaccactacctcttcgtcctcctctcctgcctcaccatcatcctcccttcctcatcatcatcctccttccctcctcctctcctacttttctccgcccccagcccccgcccccgtccccaagcctccgccccttagcccccgcccccagctgccagtccccagcagctcagtcctgcagtgagagtcttgggagtccatagctaagcaccaggagctgagcactgcccgctgtgcctgcctgcaagtctgacatggctcaggagaaaatggagctggaccttgagcctgacacatcttatgggggaaccctgaggagatccagcagcgctcccctaatccatgggctcaggtgagcagggttggggaggatggagtacaggattcaggggctccttgcccccatgcaagcaatcttccttccttaaagtgcacgtttgagctcatttgggctcttcaacctgagggggtggcgacttgtttgcttgacagtgacttgggtcccaaggtggagtgaaagtttaatctccaactttgggcagtgtggaggaaacggtccccctctacctggggccatgttgtccctctgtaaaaggaactgcagaaagcttctggctcttctgacaggttgcttgccccgactaacttacaccagggaatgtcagatcgaagcccctggaactagatgtgcaacttgacacctgtctctcagagctgctatttctaagcttagtttaggaatcctggcattaacagatgtttactttaataaatcacaatttatctaataacttgtaattaagtggtatgttcacatcgtagtacgtgatttggatttgccctaatgttttcaggttctaaaactgcctgaaatgca

SEQ ID NO: 139252 - DNA, 1079 bp, Homo sapiens
gcacaccactatgcctggataatttttttattttatttaattaatttatttatttctgagacggagtctcgctctgttgcctaggctggagtgcagtggcatgatctcggctcactgcaaccttcgcctcccgagttcaagcaattctcctgtctcagcctcccgagtagctgggactacaggcacccaccaccacacctggctaacttttgtatttttagtagagacggggtttcaccatattggtccgactggtctagaactcctgacctcaggtgatccacccgcctcggcatcccaaagtgctgggattacaggcatgagccactacgcctggccatttttttaaatttttggagagatgacgtctccctgtgatgcccaggctggtcctgaaatcctggcctcaagtggtactcctgcctcaggctcccaaagtactggcattacaggcatgagccaccacgtgtggcccctaataaaaattgagcttgtattccaaaagatccgaatgcattcagtctgtagttccctgtttcccaaagctctaaacataaattagtgccatgcagaaacagtttgtatatttgctcaggctgccattgcaaagtatcacaaactgggcggcttaaacaacagaaatatattgtttcacatttcttagggctagaagtctgagataaaggtgtcagtagggttgattccttctgagaactgtgagggaggatctgctccaggcctctgcccttggcttgttgatggctatcttcatgttcacatagtgttctccgtgtacatgtgtttgtttctaagtttctccttttcatgaaggacagcggtcatattggattagggcccaccctaatgacctcatcctaatctgcttgcttctgaatatattctgtctctaaataaggtcacatcctgaggcactggggattaggacttcaacacaggaatttgaggggacacaattcaacccataacagtctgctcacagttttttgttatatagctttatatttaattcctgatttgttaaacaggatatgagtcattggcacccagtaacaacttaa

SEQ ID NO: 139253 - DNA, 1714 bp, Homo sapiens
gcctccccagttcaggggattctcctgcctcagcttcccaagtagctgggattacaggtgcttgccaccacacccggctaatttttgtatttttagtagagacggggttttgccatgttggccaggcttgtcttgaactcctgacctcgtgtgatccacctgccccggcctcccaaagtgctggcattacaggcatgagccaccatgcctagcccctgtccatcttttaaagcagctttttatcattgggggcaacttttctgactgccccagtcccatgtgattatcctccttctctgtactttttttttatcacactttcatcatccttcatttaggactgagcatattcttactattttatattttatatattctctcttcaaaagagagaagcaaagtaggaatgccatacttctgtctctttgtggccctagggccctgggatacaggtagactctttgtgcttctgttaacaaagtccactggctttacccatgcttcaaaatggcacatctgctattattatgtttgatgtgactggataaagtaggaggtatgtttgatagatagatttgctatggccagacattagtgatttaattaaatctctccagtgactgcccattgctataaattggatttcttctttatgatatcaacaaaattcaaattgactttgggttcttggtagagtgcctgcctatgtgctatgttgtatttgttcattgaggtccaaacaattgcttattgaatgaaagattctgttaggtgcatacctttaactgttctccatttttcttctttcaggtcttatcacaatggccatacttagaacatgagcaaggatttcaattgacttctgaagtaaatctgtcttgaaaatatgaatgtggactgccttttatctctatttcactccattaacatgcaacaaactattgaatgatttcaaataattgcaaatgtataatatatattttaaattataatttaatttgaaggactgcagaacattattttacagacagcaaggatgcttctgagtgacacctaggaaattatttgaagaaattctttttatatctatacctgttgtgtaagaaactttaaaacatttgttattttctcacctttttttctaattcactttgattgctaggggtcatgtatgcttcgaagttacaggactaaaagagcaaactgaccggcctaaaactaaaatgacatttattccctagctacaaacatcagcgttattatgttaattataccttgccctctatcattataaatggttgccatggtgtttctaaaaataagtgttttaccattaatgtgtagagggcaaacaaagcataaagtactaagggatcatgcttatcctagggtctcacagaagagaggacatatttaattaatcttgtgaattacagaacaggttgtggtccagacaccaagaatcataggggtttttttttaaaaaacctaatagaagtagggtgacctctctctttggtctaagagttctaaaggaaggtaggcatctgtttaattagttggttcaccctggctttacctctggttaatgctttgtgttaataggaaggaaaaatcactttatcttttcttccaagcccctccctgcctgacttacccagactgggattaccagataccaggtgatttatgtggagatgatttttcaccttta

SEQ ID NO: 139254 - DNA, 1058 bp, Homo sapiens
ctcctgccttagcctcccgagtagctgggactacaggcgcccaccaccacacgtggctaattttgtatttttagtagagatggggtttctgcatgttggtcaggctggtctcgaactcctgacatcaggtgatctgtccgcctcggcctcccaaagtgctgggattacaggcgtgagccaccatggcgccaggcttcaaccttgtttttgtttttgtctcagtctggtctcttcataattaaataataataataacaacaaacacttagaacattgcctggcctttagtaagtgttattcaagagctttacatacagtatattaattcattcagtctatataattattaaaaagtttataatctgttatgaattatacaaatattagatatctttactaagaaaatgttgataggcgctttcagctcagtcaaaaaaacaaaaacacatccgacactgttgttaattacattcatgctataaagtatggaaataaagtagaatgattatctgaagcagcctatgcattaagtgccttcctttttaccttcatgtttctgtgcctttgttgttcccttggtctgaatgctctcccctcaacacttaagtgtgtacccttcttttcttccaagaccacctcaaatatcaactcctggcctttcttttttttgagatagagtcttgctctatcacctaggctggagtgcagtggtgtgatcttggctcactgcagcctctgctcccgggttcaagtggttctcctgcctcagcctcacaagtagctgggattacaggcacccgccactatgcctggctaatttttgtatttttagtagagacgggggcttcaccatgttggccaggctagtctcaaactcctgacctcaagtgatccgcccgcttcggcctcgcaaagtgctgggattacaggtgtgagccaccgcgcccggccaactcctggcctttcttacaggtagaattattcatgtagtcttctgattctctagcaccatatataccatggtatccttataagtatctattataatagaggtagct

SEQ ID NO: 139255 - DNA, 1036 bp, Homo sapiens
ggttcatttattaataaattcacggtccttagcctgggaccatggaattctagagcagaactgtccaatagacctttttgcagtgaagtctattaagcatttgaaatttagctaatattactgagaaactaaatttttgactaaacttaaagtgtcacatggggctgttggctaccatattggacagcaagcgcaattctagaggctttgagattttataaacttttgaaactagatgcagaaaaggatgtgtatgtgtatttttctaggaagtgagtctgaagctttcatcagattctcaaaaccaagagaaaaataaagaactactttaggtctttggtaaaaaagaagttaacaggttctttggtaaaaaagaagttgaccgaggtaagtaagccctcttgtgaccactcctgtttctcctttctcatttttttctgtccttagctgtaggtggctccctcccaccccaacgatttcagagagaaacaagtcggaatctgagaagtgaggctccagataaactgtaaactgctggaagggggcgatggctgtggccctgggttgtgcaatccaggcatccttgaatcaaggctctgtgtttcaagaatatgatactgactgtgaagttttccgtcagcgcttcaggcagttccagtacagagaagcagctgggcctcatgaagcatttaacaaactctgggagctttgctgtcaatggctgaagccaaagatgcgctctaaggaacaaatcctggagctgctagtgttggagcaattcctaactatcctgcccacagagatagagacctgggtgagggagcactgcccagagaatagagaaagagttgtgtcactgatagaagacttacagagagaacttgagataccagagcagcaggtaagaaaagaatgtgggatctttgtgattggtccaaaggaagtagctgaggcagctgggactagaccacacatttgtctctatgtcattccccagcctcaagatttctccagagtcctcttcctttttctcttc

SEQ ID NO: 139256 - DNA, 1046 bp, Homo sapiens
tcatacaggggagagaccctatgaatgcactgtatgtaaaaagcgattcactcggcggtcacatcttatagggcaccagagaacccattctgaagaagaaacatataaatgtcttgagtgtgggaaaagtttttgtcatggatcaagtcttaaaagacatctgaaaactcatacaggtgaaaaacctcatagatgtcataattgtgggaaaagttttagtcgactgacagctcttactttgcaccagagaacgcatactgaagagagaccttttaaatgtaattattgtgggaaaagttttagacagagaccaagcctcgttattcatttaagaatccacacaggggagaagccatacaagtgtactcattgttctaaaagcttcagacagagagccggccttattatgcaccaggtcactcactttagaggacttatttaagaattgctaagggaaacaggtcttacacaaattgacactaactcaaaaaaaatcttaacctgcagcaggctgtttgtcttggaagcttttgtttgagcttataagaacatagacagcttttttttttactagttttaaaacccatcttccaaggtatatgaattctagagtatttatctactcctgtgattttcttagatttgatttcttctgtctgcacaactcttctttttttaattacaatgaaaaattttgtgttccaaggcaactgtatcataggtgtaaacataaagcatataaattatgacaatccttttagaggtagggtcaatatagtggataaacctgtctatcagacgtattgattatagcagtactatagttattctgctgtcattattaaagatgattatattcattcaaagctttagatgtgtcccatgtggcaagaaaggagacagtgaattttgtcaaacaataaaaatgtgtcaggaacacaaggatgaaggggatgtcatttgcctggtaagaactgggttatttccactgaaatttgttatgtttaaggaaattaagattttaagcttgaaattatacaagcaga

SEQ ID NO: 139257 - DNA, 1052 bp, Homo sapiens
cctgcactgtctcttctaccctctgagtgtatctccccattcctgatgccagcccttagaacatcagttaaccaaaggaagaagagatacagagccaggagagctgaaggcctgggggaggagaggaagtaaactgaaatcattccattaagggtgtgacttgagggtgaggacatgacagaacatgctttaaaatactattataatgatgagaagttgcagaaggaaggagggtgggagctggagtatgacctttcgtgtttgattagtctgaactctagaccaaaatggtttcatttaaattggcctgaagttgcctggaggcactgctgtttaatcagaagggccagtccctctttgaatttttgtctctgccaaagacagcccacataactagacagtggacaataggattccagggagaatatctagcctttaatatagccatggcattggaaagtggagaccccctcctgttttatttcttgaaggaggatgttggcgatatgcagagcaaagctctccacttttcttaatagcttacgtaggtgcgtaaacattgtaaactccctttcatagtgatgcctttgagttgtgtgttagaagtagatttaggctatagctaggtacttttataaaatcagattttaaaaagtggacatagtacatccagtctagtagatcataccatctactgtcatgtaatatggcaaactgtatcattgtcacttcagtagctctgtcaaaagtgctggactggaaggcaagagatccatgttcttaacctgagtctgttactaattacacacatgaccccaggcaagtcacttaaccttttatggtgtcagtttcctcatctgttaaatgaagggattagactagattatttccaggactccttccgaaaaagtacaggagagagttgtataactgaaaggcagaaagtggaataattgaggcttggaattcagggtgacttaaaaattactttaggctggacatggtggctcacacctgtaatcccagcactttgggaggctgaggtgggagga

SEQ ID NO: 139258 - DNA, 1066 bp, Homo sapiens
tccatctcactggtgagtttaccaatgcaggaacagtttgtgatgacagagatgacagaatgctaagttgaagaagaaagtgagttggttgaaaaatactgttggaattgatttatgcaaattttctgggttgtttcagagcaagttttccccaaacttatggagagcagatggaaaaaggaaaatagtttatctttcaacaagagaaatgatggccctgctaaatttagactctggctttaacttgtgacatctgggaaaatactcaaatctgttaatcatttagtttgtataaccacctagaagagcccaatgtccaggatagacctctaacatgggcttacaaatggcagatattaccaggctgatttaatttcctttaataaaagataaaaagtcttgtcaaggagaggaaagcaacatgcattggctttctggatgtcaacaaggttttccttcattcattgtgaagagcttgctaacaagctaggaagatttggactggactgcactgctcctcaggggaatgtccagataggctgcaggatgtatgtgcctaaaacaggtcagtgcagtggctcagcaccaagtcagggggacaccacaaatggagcctcccagcaagaagttttgtcactgctgtgtgaaggagcctggcttgtgaaaattcataacgtacaaggattctttttactgtttggaaagattcattgccagtccctttaaatagctaccaccctagagaatattaatcattcaactatttttttttatttataaatagtcaattcacatacagtttgtaagggttacttttcttgtggaaagttaggtacagctgccctaaatatctttatcggttaccttggctggggaaattaacagcatgtttattaaacttgtacattatactgtgttataacattataccattttccaaatattagtaaggtcgctaacattttggaaaaggattacaagtgacctttagagatagaacaggagtttttcagaaaggcctctaacaccactcccacatccccttcgaggacagttgatctgcttt

SEQ ID NO: 139259 - DNA, 1114 bp, Homo sapiens
ctttactcttgcttaaaagtgaaaatattgcttcggtggaagaatcttggttagaagaattaatgtagctcagacagtcaatatagctaattgtctttaccaaggacaatgcatttaaaaaataactactccttcctctgccccttactccatgctcaccatcaatgtgaagctagggtaacaggtgtgttggcaggtttggttgagcctgaacagaaaactggacctcttgagccacagtccttcagccataatggacgaagtattttttgcttcagttctttgcgcttgatcattagagctagcaggtctttccgaaactgcttgctttagttctacctgatcagtgaagatatagaatagaattaggttaaagagtggttaatttcttagagttttgatacttgctgtttagtgattgtactttatatattgttcattgtataatcaagaaattctttgtaaatgtttggtttgcaggctggttggaaggaaaatcatgcaacattcatgagcgaactaaaaaatcttcaggcttctggactgactactctcggtcaggctctaagatcctcatttgatttgttaaatctcaatagattaatatctggaatagacaattatggacaggtaaaaataatttgagtgagtacagctaatttattttggtggcttggggtaagaatttaaaattgggcatgattactaagttttctgctacttttcataacctccaaaaatgagattcttattaccttttaaatatatactttttaaaaatccctcttcttttggttcttgtatatggcttgataatagaatagctaaaattgtctaccatgagataatcagatgtttgagaatgatgtgaataaacggctgagaaatatcggaacaagacaattggaaagaaactttcagtgtccttaactcctctgcccctcccaatttgatgaaaaagctctaggataagaaggcagagtagcatttgctgttgctcccattgtcctttcctcctctaaagtctgtgctcacagtaaccagagtcactctccaggttgcagcacgcaagtcactagtgtcctatctgtgccaggattttgacttaagtgaa

SEQ ID NO: 139260 - DNA, 1098 bp, Homo sapiens
atacttttattactttacatggctctaatgctttttaaatgtattttaggggagaaatccattttttttagaaccatctattttaattaccatcacagatggaaacaagttaacaagtactgctggtgttcaagaagaggtgagattttattttttttttaattttgtttaaatggcagggaacatgcagctatttctgtgggaggcatttccagttaacagtaagtttggtcaaatcatccatcttggtaatccttgaaagactgcttaattttattgagttacatgaaagaaaaagtcaaccctttaattctttcttcatttttatatggtttgttatgatgaaccttttcacatttttgccttatcagctccatcttcctttgaattcccctctgcctggaagtgaactaaccaaagaaccttttcgttgggatcaaaggttatttgccctggtgttgcgtttgcctggagtggcttctaccgaaccagagcaactagggagcgtaccaactgatgaatctgccatcacacagatgtgtgaagtcacaggaggtattggcaatatttaatgtttctgaaggaaaaattcagagcatagagtatatttttcattaaatgccatatccagtctttacttgttttccttcaaagccttttaactctgttgcttaaggtcatcattggtatatttgctgccaatgtagttatgattatttcaagttatattttaggattttaaaatgcttatattatgaaattatatttgatcaaacttgtgctatttatttttccttctgggataggtcgctcctactgtgtgagaacacaaagaatgttgaatcaatgtttagaatctctagttcaaaaagttcagagtggtgtagttattaattttgaaaaaacaggaccagatccacttcctattggagaaggtatagtagataacttttttaaccctaaagtgttatataggagaatgagaagacattaaataaattactatagacacagtcttcactatccacgtgcatttgagtggttacaaacatacatccaaacaactaccacacattcactgcctatgtatatgtatca

SEQ ID NO: 139261 - DNA, 1042 bp, Homo sapiens
tttctctattttattcctttaactgccatggttatttttataaaacacatctatgtttctcttattaaaagtaaccttaatttcattggaatttaagaataaatagatctggattcatatattacatcaacttccctttttaactctagaaattctcagtatggggtttccctctggaaaaagaaaatctgaagacattacagttgcctattgcctcttaaatgtgtcctagacacagcatgaagttggggcactggtggtgagaggcggaatccaaaaaaattcagaaatgacttggcctcattttggatttcataatgtgaagtattcatgattttgaactggtaatataatctaaatcaagattaccaaaataatttcagaggttgatgtggtaacctttaagcgaagtttctagaggtgaaaaggcagaatcttaaatggtaccattggtgtcactgggaggagaaattggggtgtgttactgtttaccatggcagtaatggggcaaacaataaaatgcaatgtgaaatgatttgatgatttgggaaataagattgaacgcaatttacttgtttgaatttgctgttacttgctcttcttatcccactctcttctgatttttttttactttctgctccttacttctctgctattttcattgccactttttaatgttccatgtttggttttatgtgcagcaccttgacttctaagaaatgaatcatgtccctttgccccttataactgaactttgagtattttaagatttattctattcttactgttgtgtattttgtttccttatagccattaaagaaagcactaaggatgatgggagctccaaatctgatatcagataatttagattgtggacttagttacagtgttatctcttaccttaaaaaactcagccaacaggtagtattggtaaaaacaaacaaacaaaaatcctttgccctcagaagtgcatttccttattctttagtgtaattgtaatttttcaaattaaatgtgtatatatctctacactttatggatt

SEQ ID NO: 139262 - DNA, 1028 bp, Homo sapiens
ggtcaccagtgtttcttgagccatttcagatgtatgtaaaacacaaaatatgccaaatatatattgctataatacactcaagcagtattaatcaatatggtatcacaatgcctattaagaggctttttacaaattacttacttagtaatatctgttaaattaagcattatcttctaagaccttttttggatagtcaaatataagagataaatagtttaattttttcagaccttttttggatagtccaatattagagataaatagtttaattttttcagatataatgccagtcgatgtgatctgaattttagtactagtttacacgtataaatacagtcttaaacctttatgtctgagtctgaaatgaacctgttcacttagactagattttatagtaacaaaatgtgcttttaaatgtctatgaatgaaattcttattcatggtttttattctctccatgattttattataattttgacactagacaagaaaaaaaaatattatttgtctttcctgccccctatctgtttgctgtgatagtgcaaagaagcacaggaaaatgtttaattatccatttttctgtgatttgtaattgaaaattgttctgtggggttctgaaagtattatctttcttaagtagtaaaaatgacagtggtaatgtagatgtttttataacatactatgtactttcattttagaccaaactagagtcagaacgaatactagcatcagtggggaagaaacctccccaggaaattggaattaaagtgaaaaatcattctggaggtggcatgtccttgactcacaataaaaattttagaaaactattgaaagaaatcacaggggaaactgcacttagactgacagaattgaacaccaaagaatttgctggcttccaaattgggctcttaaacaaggtaaattgtgacataaatagtttgtatttgtttgaacttgtctgatacatttatgtctttcatattcctttagttttgaaataatggacaatcctattttggagttagtag

SEQ ID NO: 139263 - DNA, 1039 bp, Homo sapiens
gaagcagatgagtttgtagcagggccacaaaacaaagtgaaacgtccaggggaacccaacagtcctatgtcatctaagagaaggcggagtatgtccctgctgttgaggaaaccacaaacaccacctactgtaactaaccatgtgggcggaaagggaccaccctcagcctcgtggttcccatcttatccaaacctcataaaacccacccttgtacatacaggtatagagtagtggttgtgatttccttatggctcctagaggactaagacgctaaacaattttatttccctttttgtgttccttcctttgtgttcagtttgtgttcattaagtaagccattactaaatcatctatttggtaggtacaataaaccccacagggagcagagaccctgtttcaaggatctcaatctacatgaggtgaaaaaaattataattatatagtaattaacacacagtaattaacagtaatgaatacattgcttagcaagtaaatgccacagtaattaatggagaaatggaaagaggtgagcatgtctgctgcaaccttttggagtggctgcaagggtgaggaggataaagcaggtttccctggcagtaggagcaagtggactcagcaagactggatctgcacttgctctttgtgttatcaccacctatgcatgctctaatccggtgcagtctggtatctgcctcctcgaccccactgaaacattctcatcaaggtcactagtgtgtgcagcacattgccattccttctccacagcatttgacacagttgttcactccctcctccatgtgtacgttgggtgctcagacaccataagcttatagctttcttttccctctaatagcaactccctttcatcctctttttctggttttgccttttctttccacctctaaatatcatagggcctcaaaactcaatcctggtacctctcctgtccttcactgcgttctcttcctaggtgaccccatgcagtcttggggctctaaatttgacctctagaatataaattgctcctcaatttcagact

SEQ ID NO: 139264 - DNA, 1082 bp, Homo sapiens
aaagagaggaataggctctgccttgcttttttctcaaaccctggccctcactcatagttaaggctgtctccagaagtatttggatttatgttatctgaactcaactcattcatccttctacttttatcatagcctcaggtaggcttgggccctcaattgccactattggtacttgctctaagacatatctttccatgaggacaatctttatattcctatgtagattgtaagcttcgatttgtatcccacacagtgccttgaacatcatgagtactttaagtatcttttggttcataaaatttctctttattttcaggtttaaaagacgagtcctaattcagtaccttgagaaggtactagaaaaaataaattcccaccaccttcacaacaacattagtcacatcaacagcagatcatcatgttagtgcaaagaccagtgagaaaaaaatgacaagttttctgtgctgtaggatggaacaggatattgttgaagcctcctggaatgtttgagtcaagggaattgctttccagatgctaagaagcagcagtggggcttttgaattttatgattatctggcagtgaaagctgggcttttgccttaataattttttaaagtatgaattgttttgttttgttttcctcaattgaggaagctgatgttattaattcacaggctaaattcggtaaacaccactgcccctaccacgggtaatgagaggtcactcacttgaactttgccattccaggcattctcagagtggcgaggggccacctgcaagtggagcacaacttggtgctcttactgtgtccttcagaaagaataggtgtacagaaaggaaatggcaatcttatgtgtgctgaacaaagttttcaacaattcctagttgtgccttttaaaccatgcaatattcaggatagtttgaatcaaagaagtaagaagctgctatttgggtaacttatttctctgtgggaaggggcagggagagtcaccaaacaatctacctccaactctcttctcttttgtctagagacattacaaagtgcacttgaggctgcccccaacctctgacatttgttcttg

SEQ ID NO: 139265 - DNA, 3899 bp, Homo sapiens
caaaaaataataataaaagaaagccatgtgtggtggtgcgcatctgtagtgccagcacttggggggctgagatgagagggtcgcttgagtccaggagtttgaggctgcagtgagctatgattgtgctactgcactccagcctgggcaacagaatgagaccctatctctattttttttaaaaagaagaaatttgagagctatatgctgcttttccaggtttcttattttctttatataggaaaagagatacagtataattattatttacagtctgatttcatgtattaatacttgttaaaaaatataacccatagtaaattgataattcgttagaagcctacttattttcaagtagggttttataaaggtttatctaaaattgatgcttttttcttctttcaaggacatttgatacgttaaggaatcacccatccttttatgtatttaatcatcgtggtcgagtacttttccggccttcggatacagcaaattcttcaaaccaagatgcattgtcctctaacacatcattgaagttacgaaaactcgaatcactgcgtcgttaagatttttacaaattataataataggacaggacacagagctggaatattggagtttggggtataaaacactcctccctgcccccattagtatttatattgatctttcagacctactttagtaaaaaaaaccatggcccttgtttatatactgttaatccaatcattaatgcagtgtaagttatatgtgaaatgagtctttggtatttcatataggaattattttttttttcatttaaaacaaatccacatcttttgtaaaagccactgttttgaacacatttccttgaaaaatgttggtggtttttgtgattatttatttttttagatttcttttcttttgcactacaatttttggaatccttttggaaatactgtgtgactgctgtgttttgcagcatgaattatagtaaaatggtcttcaattcttaacaaatggacttccctgatgagaccaaaatggtgatttaacagtttttcttgtgtcccctaaaaagtggctctgcttcagaagtacttgccagtttttaatttatttgtgacttttcaccctaccctgctcccatataccttctaccatcagctgtcttgtttcatcatttctctgagattctgtgtgcagtgagcaatttttgtgtcagaaattctttgtcagaacaaatatatgtaacaggctcaacttactgtaaagctacttgtgttctcttcatttgtctgtaaaaatttccctaattgattatatagtgtaagaatagttgaagactagttgaagaccttttgtgatttcattatcatgcctatgcagaagaaaaatcattgaggaaaattgtcattagccagtttaactgattcaaactctgtttatttcatactaaactagtgaataagtgaaataaaggaaactcgtcattaatctaaagacagagttcaaaggaattgggccaaatatattctcagtatttggaactaatgtttttaaggtttttaggaaaatcaggtcatttaagaaattgttttgtagtttctggtttatagcagtcttcaagttttccatcttcactgtatgttgctgaaagtgaggatgaggatacagagttgatatttttagaaacagtaattttacttttaaggaaattggctagctctttgagctagagagctgtaggaagctcaacatttctttgtagagaacgttgctttttttggattgtacaggtataaaaacattgcttttgttgaattgtataggtgtaaaaagggaataactgtatgcaggtttgaaaaggaaatgtgctttaggcatgagtcataagatgccattgtacttgtaggcattttattttcctttagaaatggacatcagctcttctcttctgactggtaacacatagccccaaagcatgagattatttttcattgggtttttattgttgtttagttttggtttgttacgccagcccagtctgtctgcggaacactgactctgctctctaatgagaacaaagttagaaatctgccgataacctaaaataatttagaaatgaattaaaaatgtgaaatcgggttaaagtgatgatgataaaatagcatgcaagaaacaagctccttccatcagacttggctactgttttcttctggtacgatttggtttggaagagcctcttgtttccttctctttggggtatgtcttcgtttcttaatatgtttgtaacattattgagatataattcacataccttacaattcacttattttaagggtacaatttagtggtttttagtgtattcacaaagttgtgtaaccgtgaccacagtcaattttagaacatttcgttaccccaaaaagaaaccctgtacccttgagcagtcacctctcattttctcccagtgcccaccccatccccgagcccctggcaaccactaatctatttctctctctgtagatttgcttattctggtcatttcatataaatggaattctacaatattcggtcttttgggactggcttcccaaatatgattttctatatggagtgagaaaattcttctcatcttgagaactcttattgctgtgaaagggagtggttggtaaaatcaatagatttcaggcaagagggccagatacctaacaggtttttctccgtgaatcttatgctgagtagtttttcctcataaccaagcatttatgatatattactacttataatactgtggctagtctctagaatggatgttgaaatctttgcctcctcagtcgggaagagtcctgctaaaaatcaggctaaaaatcaggccaaaaatcaggccaaatgacttggcaaataattgacaaagtggttttcacgtgtgtctatctttgctagcagcttgtatacctcaggccaggtgagctccccaaatttcttttttcatttactccagtgagtttctgctgtctttttcaagtatgtaccataggacttaaaggtgatttggatgcgttgtaacactgctaaatatgctaagtacagaattttatctacagtactgtgagacagtcaattattgcctagggtagttcaaaaatatgatgtgagctagttaagcctttgcttgactgatttcagtgatattcagaagtgtgtaccaatcaaggctctttaaaatacggaacgactcacttaataaccagggaaccagccaaatactgtgcagccgcagaatatgcatatcaatgagttggaggtgattattctctgtaactccctaatgattgttttctaagcattgtggcttctcagtggcttgacagcatcttcctggttgtatgtggcctgtttacatgatgtattgaataatgttgtttgttgtgagcatcaatgcctgtaacaccaaactaaacacgtgtttttgggatatgtttccaatctttaaatgaccttgccctgtccaataaataaatgattgtctcaccctgtttttggtagtgttttttgggctttttttttttggacttttaatctcatttcttctgcttttctgtccccagaaaaatgtaagagctaattttatgactgtatttttctactgtgatgctgttttactgaattcaatggataatttaattgtacatgtaaaatcttactgcagttttatgtttttaatagtcaaaatagaatgtataatcttgatgatgtttataaatcatcaaatgccctttggggtgtaaaaatgggttcttgagcagcagtgtctaatgattccatcacaaatttgttataaagccaaactcccattgaaagtgtcactttatacttaataggaaatcgttatgattaaagcatcaaggaagcaaatataa

SEQ ID NO: 139266 - DNA, 1572 bp, Homo sapiens
aggctgaaacaggagaattgcttgaacccgggaggtggaggttgcagtgagccgagattgcaccattgcactccagcctggataacaagagggaaacttcgtctcaaaaacaaaaagcaaacaacaacaacaacaacaaaaaaaaaacaaaaacaataataccttaaaaattcttagttgctcttggaagcaggtaatatttgatcattgagttctgagtggctcagtaccattcagtactcagtgattttgcttatttgaacactagatttatttattgaagcatcagaggtatttttgcagccaatccacagaatttatagattgtattgtgtctgaatcccagtcatttcaagtgagcattgtctccctgatggtggccctgagaggactacctgttagaggcaatgaagaggtagagagaaaattgtaaatatttataataatgtttgtgttatttagtattatcaatctttatactcacagatagttcttcagacacttctggcctttgcagttacctgttacggtatagttcatattgcaggagagtttaaagacatggatgccacttcagaactgaaaaataagtaagtctttctcttttcataggcattgcatttcatagaggtttgctgtattcacataattttaaaaagtatgttttctgatacataaaagttggttttgtttctgcattttgattacacagtttgtatgaataatgaggtaaaaacattgaggcggtatttgatactgtaagaaaatggaagatgaatgccagattattcacagtagaatcaaaaaaatacgttgcttaaaattattggttggttgtatggatgaaaatagatatatagaaaaataatgcctcagaatttttaacctttctccttccattccttccttgctccctttcttcccccctcccttccccctttcactccttccatccctctcttcctaccatcctctttctatcctcttgtcccagcttagtctttggaagagtaagtggttttcggtttcccctctcacttgaacctagtatgtgagataagctctgctcccaggcccttttctactactggattaaaagtatatttgttattctgctttcttttttttctcctggactacttctaagctattttcatgagctatgtttgcttttatttttcatatttttactttcctaaaatcatcctttagctttgttcagttccatctctggactttacccaccttcttgatcctggacatgatgcccctttacaatattttcttagaaggagtcacagtgaacatttatgtgttagaggaaagtcatatcccccttttagttcattatgtacattttatttatttttatttctttctttctttatggagacagagtctctatcaaccaggctggagtgcagtggcatgattttggctcactgcaacctctgcctcctaagttcaagtgattctcctgcctcagcctcctgagtagctgggattaacaggcacctgccgccatgcccggctaatttttgtatttttagtagagacggggtttcaccatgt

SEQ ID NO: 139267 - DNA, 1396 bp, Homo sapiens
acccaccagggccccccccccccggctacgcccacccacccacccactggccccgcccctcggctacacccaccctcgtgcgggccccgcgcgtcttccccaccccgcccgtctgcctaccccgcccctcgcccccacacgttctctacgcaggcccccgtccctctgccccaccctgttctcgccactggccctgcccccatttgccggcgcccttcctcttcgcttccccgtagctcccgctttcgcctcttcgtttatgactccgttgggctccggccctcctagagaggcctccatagcgcaggttcgtgggttctcgcggacctttttccgtgtagctttctgcttcttcccggcattcctgtttccgttttctcacagccctctggcttttccaccactgagacactttgcgctcaggacttcagtgacgtcatctttctgcggcgcgcggacacccgccggtggaagaagaaacagctccgccgtccttcgcttcttttgctgggctgctgctccttcggcatcatggcgccgtcgctgtggaaggggctggtgggcatcggtctctttgccctagcccacgccgccttttccgctgcgcagcgtaagtgcctggggcacggggaccgcttcggtgtggaaccctaggggcggtgtgtgggcgcacttctaagggaccatcggaccgagtgtcagattaatggtcctttgagaccttacagtttggggtgactaagaaaatcagtgcaggagttcccagtggaaggttcggagtttgaatttggagagagtgtggcacctgaaattgcaggaaggttggaaggaggtgtctgggagagggttcagaataggagtctccaggaatccaggacaagtgatgtcagatccagcatggggcagatcaggcacagttgtgagattgaggactctggttgctcatggtcccacgacaaccaagtggacaacatcttgggcactcttgggctgtccaggcagagactgagtagttaagtgaccgattgcctcagggaggcactgtggtacaggagaaagagcactggactgggagtctaaaggactggttgttaaaaacttgcattaccgctacatctgtgtgacgttgggcaaaagatttgtgctacactgcgttatgaaattcagttttgggtcgctgtttgaaattgcgctgtgtttaggtgctagagatacagtgatgccctgagccagttcaaagtctaaaggaaaacaagtggatcaagaagtagttacaataaagtgatatgctaaaagtatataaggatgcatggaagcagggacagtcatattttgggggaactgggaggttaaggaaagtatcctagatccttgctgcttacagtgtgatcaacag

SEQ ID NO: 139268 - DNA, 1105 bp, Homo sapiens
gtagaaagcgcagtctgcctctgcttggttacactgagccgatgtttctttagccaaaggcagtgggctagtttagacggcctttcattcccggcagcgcctgtgggtgcgtgtgacctgggacagaggggcaaaggaacctggcagagcgagcttgggatgccgcggcccctttaagagcggcggcggcggcgcgcgctccgacggctacccccgggccccgcccctttcccgtgagccctcggggagtggtccgaccgcgggcggccgccggtgaggtaggggcgggaggcggggggagacatggctcggcgcggctggcggcgggcacccctccgccgtggcgtcggcagcagtccccgagcccgcaggctcatgcggcccctttggttgctcctcgcagtgggcgtctttgactgggcaggggcttcggacggcggcggcggagaggctagagccatggacgaggagatcgtgtccgagaagcaagccgaggagagccaccggcaggacagcgccaacctgctcatcttcatcctgctgctcaccctcaccattctcacaatctggctcttcaagcaccgccgggcccgcttcctgcacgaaaccggcctggctatgatttatggcaagttcctcaacccttgtcagccccttggcgctgcccctttctctgcccgccggctgcttcgcctcctctgctggccctgctcggcctacgttcggctccccttctaattccttccattttctgcctcgccttccccctaccccgcgtttctctgcctcaccccctttcctcttcagcctcgcgccccattttatctgcctctccacacctttttcgcttccgaccccaccccctttttcctccgcacccccagccccccaccctttccctgcctaccaagctcgggacccggggctgaggatggaaaacgagtgggcgcggtgtctggaattgggctgggggctgggggaggggagacaccattgcgatccatttctctggggtgtcagtttgtttaaggttcattgaaactgcagtagtatctctactgcccagaatctggcgttcttttggagccagagtcgacctttactc

SEQ ID NO: 139269 - DNA, 1188 bp, Homo sapiens
tgaccgattgtagaataaatggcttcgattcttgtgtctcagtctgctttctgaggtttattattattattattattattattttggtgacaaggcgagaaggggtaaatcaaagtgtgggctcagaggcattttgagctgtgctggggcctcaagaggagaaaagatacatattgccgactgtattaatctgtgcgggtattgctaaagagatgagggcggacaaacaattctttctgtgcagtacatgtgtgaagattatcttcatttggagcagttaaaccgatgagcttgttgaggtttgtctctcagacttgcagataggtagatgaagctttggcacaaaagacattgctccatgcaaacccccgccccctagtaaatccagacttctgtaatgtgcatctctcaaggatagcaaggaaaggtagttgtgtgcctcaggaagatgcatgaactcaggcttatttttcatttttaagagaatacagttctgagcctgcgtgtaaaatatctctgctcactaagattcctagtttttagacatattagatggtttttatatttaatatgttttgcatttcatttgcagtgcaccttaagccaaattggccagataagctatatatttctatataattttctgcataacagtgtgtgatttatttactatcctcaacaaacatttgttgataaaccttctatgtattatgctcagaaaatacaaagaggtataagatctttgccttcaagtcacttataggcaggtcatataaagaaaataatggcatcttaaatttggttaaatgccaaatgagtattataaagtaatgaactgatcagagatacttcttttatagagagagatagtatgatgtggtaattaaaggtacaaggctttagaccagaggtcagcaatttttttttttttctgtaaagggccaggtagtaatgattgttgatcttgtggatacgtagatctctgtcgctgttgcattttttttctttgatttttttttctttttataaagttttacaacataaaaactattcttagctctcgggccatacaaaaacagaccaagggctgtagtttgccaacccctgctttagaatcagacctagattcccgtcacactctgcccataggtatgtgtgatcttagacaagtcccttactctcttttac

SEQ ID NO: 139270 - DNA, 1023 bp, Homo sapiens
ttcctaaaatataataccttcaaaaaatccttctcgcctcctgtcagtactctcttaggttaggacctaaactcttattgcctgaatgcctacagtagccctgtatctagccttttagaccctctttagtctagaccagtctttctaaagtagaaatctgctatcaagcctctgccttctatgacttcattttacttttgggataaacttcaaattcccttccccaacagataagatcttttatgattcaactcctgccaatctttcaaacctcaactcttgtcactttataagccagccatactaaactacttgattcactggatgggctgtgttgtctccatccttgactgatatgtactactattcccctacgtggaatatacccatttcttctagtttgttacctgcccaggtgacatctctggaaagacttccctaatgtcttactcccccagggttgcatagttgtctcttttctgtttttataataccttgtatacatatatatatatagcattatgattgtttattcagtctgttttcaccaactggaccgagttttccttgacattatgattgtttattcagtctgttttcaccaactggaccgagttttccttgaaggagggaccttgttttcatctctgaaccctggaggcctacctagcatagtacactcattcacgtattaaaagaatggctggctagtcagaatgaaaggcaataggaaggtaaaatgcagctagtagtggtatactatgcatggagttaaggaaagttccagaagtttgggttttatttgtagttgaggtatgtccatacaatgaaatatcgtttggtcgtaaaagtaaatgaggttctgatgcatgctacaacatagataaaccttgaaaatatgctaagtgaaagaagtcagacacaaaaggccatatattgtaggagttcatttatatgaaatgtctagaaaagacaggtccataaagaaagaaagtagatgagtggttgccaggggctgtggat

SEQ ID NO: 139271 - DNA, 1050 bp, Homo sapiens
aaacacatttctaacacgattgcactgtcgagttgggacacattggagcatattctgtctacagatgatttgaagatattttctccttttgttaccttcctcattacttatttaaatattgatctagaaatgcagtgatctgtgctgttgtcctagggaatgtttttctctcctgtttcactggattatatgaagattgggctgtttgttgtatgaatttagtaatattttaaaacataactgcatttcatctaaaaatcagttctgagctacagggaactaccgtaagagattttctcttatccatagttatgcgtggggtacaaaagaagtggtctctgtcggcaagaagagcttatgttgttcttttttccaggtcttttggtgggccttgtgcttcggtatggcattcatgttccgagtgatgtaaataatgtgaccctgagctgtgaagtgcagtcaagtccaactaccttactggtaaatgttagtggaaaattttatgagtatatgctgaaaggagagattagttcacatgaactcaataatgttcaagataatgaaatgcttagaaaggtaagttcttaaaggaaatctttgaatcttttttgtgtctaactagcagcaaaatgatccaggagaaaataagtaatggatttttaatgatatttaaaataatgagtctttttcaatggagtaaaacctcaattaacaaatgtaataatgtaaggaaatggatatgtctgtacaactcattttctgattgaggttaagtagtataactctttttgtttctctctggattgtttacagcttgttgtgataaatggagactgggattgagttaagcagaatttataagcgtttctttccatttgcagatggtccttatagttttctttttctttttctttctttattttattttttctgagatggagtctcactctgtcacccaggtagagtgcagtggcatgatcttggctcactgcagcctctgtctcctgggttcaagcaattctcctgcctcagcctcccgtgtagctggga

SEQ ID NO: 139272 - DNA, 1011 bp, Homo sapiens
tctgtgagagaatgaagccttataggaaacaatttgagtgagtcttttctcatttcacctaaggatgatagcgagctagtgccattttaaatttgtaagagataatacgttaactcattacaacctcagtgggattctggtggagaaggactgtatcttgagaggaacataacagagaaattgttagctctgtgttttaatagaattgaaaaaatgagttactgcccaaaagctgaagggaaagcagttgtgtgctcgctgtgggagtttactagctggaatgatcagtggtatcatgctcatcattcttcatttaccttttatgtgttttgaagtgggttagatgcagatagtctactttgtgttgaattttcttagtttgaggattatctactgtctgcattctgtgtaagcagctttgcatcaaaggggagggaacccctttttgaaggagttctgtttggcagttaacaggttaaggcaactcatcttgaaatttatgttggaggttgtttttgtttctgtctggtttttttttttcccaacttttattttaagttcaagggtacatgtgcaggatgtgcaggtttgttacataggtaaatatgtgccatggtggtttactgcacaggtcaacccatcacctagatattaagcacagcatccattagctattcttcctgaagcactgtttttttttttttttttttaacctattggagtagcagttattttattttattttattttattttttaaaataatgcttttaatccagtgagggtgaagtgaaattgactccctcatacatggctgcatgaggtagatctatatgtatattgatatattatgttagatacggtatatgtagttagagataaagtatacgttgcatagtattccactgaatggattaccgtgattagcctggggacctaaatccatattagtttaaaatatgttgtttacagtcatttatatttttatgaaagaagatgtacagagagacaa

SEQ ID NO: 139273 - DNA, 1059 bp, Homo sapiens
cacggtgaaaccccgtctctactaaaaattcaaaaaattagccgggcatggtggtgggcgcctgtagtcccagctactcgggaggctgaagcgggagaatggcatgaacccaggaggcggagcttgcagtgagccgagatggtgccactgcactccagcctgggcgacagtgcgagactccgtctcaaaaaaacaaaacaaaacaaaaaagtttccagctctaaaacttctatgatacttgtataaaacagatacgttattctttgtcaaggacttcttagtttggtatacttcagccttgtgctggaagaggcttcttttatggctttttataagtgaactgaggcataaagcagcagtaaaaagagttctgaaggtgatgccaagagtgatagtatctcttccccattacaagttccttgagggtagaaagtatatcttgttaatcattttgttgtagtgcctagttgtagaaatgactctagattctagcctgagattggtcgtaacttggcacaggcccttccactgtcagctaacaaatacttgttaaactagtataaagcagtgaagtgcctcaatttcttcatcatggaatgaatgctctatatcatagaagtggtagaggatcaaattcgtgtaaaatctcttggaaattatgtatttttataaatgtaaattgctacaattatggaagctgtctagctttgggtctcagattaatagaggtggcatgttatagatctgatctgttactcccgtctctatctatcctttactgcatggtttctggcaaggtgtgtgatacccgtgaaacaattggagtggctaagccgtaaggcttcctcactgaagggaaggcagctgactcctcagtaagatgctcattttaaaagtctccctattctggtggtaccttattctgagatttctgtgttagagaagctagagaacctttctttcatggttgccttgcttaaactgttattttttctagtcacacttttgtgttacaagatctcattactagccttaacagtcttacgtgacaaagttcac

SEQ ID NO: 139274 - DNA, 1010 bp, Homo sapiens
gaaactatcagttttagagattcattggtttgggggagctggaggatgagggatggttagaggtcctttctcatcattatgggtaggaagtgatgaaagtttgactaaggcagtagcagggacacaggaacattaaaaaaaactgacagtttggaggaagaggagaggaataattgaagatggggctttgaagaagggaagctgttaggggaaatgagggggcaacattcctggctttttctgcaggactagaaatgtcgtctccacatttgctcccttctgaaccacatattttgtgtgtatgcatgaagtttatatatatgagtgtctgttttaatatcttagtaatactcatgctttcaaattatgtaactttatttgctggactaatcttttacaatttcgtttcagttgtttgagcttctcaatttcttggcagagaatttcatcttctcctacatggggctgacactgttcaccttccagaaccatgtctttaacccaacatttgtagtaggagcatttgtatcctttattatgtgttttattttgaaaatatttttaattgagattttcatgtgggttttgagtatgtggttcataagaatacatttaaatatatacagttttcctctgagtaaaacaaataaggattccagctcttttttctagtctatttattttattatattctatttcaatttgtggttattgcacaaataatgttgacagattaaaatgacagacaagtgtcccactgttctgccaaccccaaaagataagtgttttccctttattactacagggaaggagaggttggatactggggagcagttagcagtctatgccacagggcagaaggcgaaagataaggaaacgttgaatgaggccactttctttctctttctctccctcccccaacccctctctctccctctctctttctctcatatatatacaaagagtcttataaaataaaaaccccaacctgggcaatgtagcaagacccc

SEQ ID NO: 139275 - DNA, 1054 bp, Homo sapiens
cctcacccttccaggtagctgagactataggtgcctgccaccacgcccagctcatttttttgtgtgtttttagtagagacggggtttccccatattggtcaggctggactcgaactcctgacctcaagtgatatacccgccttggcttcccaaagtgttgggattacaggcatgagccactgtgtctggcctaaattctgtgcttttagaaaagaagattatggaaacatagaacatgagcactggaaagggccttcagaattctctaaccctcatcatgtttttatacatgaagaaattcgggcccagagagagaaagggacttgcttaaactacttaatgtcaataagctgggactggaagcagattgcctaactgcccaactgctgactgcaccatattacaaataaagacacagtttatatttttggaaacttttagaagacgcctacttgctatgttagtttctcctcctagctggtcaggcttaccatggaatttccctacttgtttttattttgctagtgtttcaagaacatagtagcaactttgaagttgctagttattttcgagatccatgacgactcccaaatatagggatgttgatgtgatattttctaaggtgctattattacattgagagttaagtctttcaggttcagtacatgaattataccacattgattttttttcttttttttgagatggagtctcgctctgtcgccgagtctggagtgcagtggcacgatctcggctcactgcaacctctacctcccgggttcaagtgaacttcctgcctcagcctcctgagtagctgggattacaggcaggccccaccacgcctggctaatttttgtatttttagtagaaacggggtttcaccatgttggtcaggctggtctcgaactcctgatctcgtgatctgcctgcctcggcctcccaaagtgctgggattacaggcatgagccaccacacccggcccccacattgattttttaagtgagagtagattcgtaagttagcaagcagcctgagtaatagaggtgttcagaaa

SEQ ID NO: 139276 - DNA, 1036 bp, Homo sapiens
tggaacagttttatcccaaaactgttttgttcccagcccagtccatggaaaaattgtcttccacaaaaccggtccctggtgccaaaagagttggggaccactgctttaaatcatgccttttaaacattttatcattattaaaattaatttcttatttgaaaattcacctagcaaaaacagccatggagttctttcaggctctgatttatcagtaaatgattcaaaacttggtttatgttctattgaagcaaattggagacaaccgtgtaagaaatttgtccttgctttcaactttctgatgaaagccttgtatatttaagaaaaatcacttgacacttaatgattagaagctactacttaccatgttctgtttggtaatttttgcattcactgcttgcaagtacttcaaaattaaattattgtatggaaacaagaatgcaagcatatctggggtattaagactcccattagagaaagagagcctggctcttaaaattttttaaagattatgtcattacttttggctccattgtcagggttttggatataagccactctcatatctcttggggctttttcatccctctaatttagcaataattttttagtgagttttctgcataaaatgttttgtacattttctacataatatataaaacagttcaatgatcctaatgttgagaaagcgtagaataatagcttattcttctgtatattttatggaagtaaacaccaaggcttgtttgactcagtactgccctattaagtcctactcaatgaagacctgatcattttaatacctagtgccctgatataattaaatattcattattttagatttcagttcatttgtgtaggcaaatgatttgttataattgagctataacttgaatacaataaagtacacgaatcttaagtgtacagcttaatgaatttcaacctgtgtcaacaactgtgtgcctcccacccatacaaagatacaaatgaacattctctatccccctccacaaaggggtaaccatgattctgactttca

SEQ ID NO: 139277 - DNA, 1050 bp, Homo sapiens
atgatgaaaaccattttattactatgttctactggaaaatttaatttcctctctggccattaacattgtttactttctcccttatctcctgtagtgcccaatttacagtgatgttccttttggttttagtaaaatcagaaaagcaatgtgatgtagtggaaagggcacaagatttgaaattcagaccaatttgggctagcagattggtccccatttacctcattgtgtagctttaagcaggtcattgacctctctgagcctcagtttccatatctgtgaagtggagatgataaaatacccctttgctgtttcactgccatcatgtgaggaggaaatgagaccatagatgtgaaagccctttgctgtcctccgaagtggttactatactatgatggtgattattatcaaacgagttgctcttttaaatttgtaaagaaaggaccacagctcttccttaaccaccgcagctatctgaagcctctgctgacccacagcgggcctccgctgacaacaacactccctgcctgctgtggacccatcgccaggtgcctcaccagcccccaggcttacgaagtaagttggttttatccaaaactaaattcttcagtaagttaaatttatctgctctgtggatgagtcactggttttattttattttggtttgtttttttgcctttgaggtataaattccatgaaagggaatttaagcatattttgctcaaccagaaaatacactgaaacctataaatataattcacagcctttgaaacagcatttgaaaacagatatagaatcgtgcctcatcttactgtgggtgattttagtaaatagttctatttccctgctggctttcatttctttgcagtatgtgtcctgagctcagcactaaatgtgtatgctttcctccacaaatgagggttgtctcagttacattttgaggattttaaaacaattttgacatccctaaagtgcaacagatggtctattatttcacacctcccaacctttggatgtttgggaaagctatctgcctctgttccacatttctgg

SEQ ID NO: 139278 - DNA, 1189 bp, Homo sapiens
atttagaaccaggaacagttgaaagatgatgattctgatcttattctcaatgatggtgacatcagtttgacatatggagattctactgtgaacactgaaccggccacatccagcgccccaaggagatttatgggaaacagttctgaagatgccttggatcgggagcttgcatttggggaccatgaactggtcattcgaggaacacgcctggttcttccaatggatgattctgaacccccgctaaatttgttagataatacgagacatggtccagcctaagcttactaatactcacttagtgatttgtaaaatttgcacatgtgattgtgaagaaatttgtactacctaaaagtcccagtgcatgtctctgaatgtgtaagctatataaatgctatttatatggcatagaaagaatataaatatcctgtacacggcagattgtgaacaaactatattcctttaagttttcctggttgcactctgtagactggatctgttttaggaagttactttcacagtgatgttgtgtgttctgttagttttatgtctcagttaaagtgtaaaaagtgacggattttctctttcttaaacttacctgacacttaaccagagtaccagttctcgtgatgtgaattaatttttttgtgtgctaggggagggagagtgaggagggagtgttatttccttgggaacctagggaggagaggttcctttgttgggaaacttttgttgatagctgctgcctttgtcctgatcgttttctttcccttttctctggtggcctgttgtggtgcaacgagctgatggcatttgatcttgccccattcaggttggggagtgaagtgtgaggacccttttcccccgcttgctgtgaaagcacagattcattgactacagtacactgttgttcagaaaagaaggctgcaaatgacttctgagactttatgtcttttcttccagaccaagaccgtagaaggagtcacatctagccggcttagccaaagtacaggtgtatatagttcagggcacttgatttagatttggaggggctggggtgggcagagagcaagaggcgagtaaagagaatggtggtttcagagatctctcttcccaaatgtgtaaatattctataccagataagtttaaataagaaatttaattgctgcttaatttttgattatgtacttta

SEQ ID NO: 139279 - DNA, 1020 bp, Homo sapiens
catgacgtgtatgttttacatgatgtgtgcctcttcacgcagtaaatagtttcttgttaatgtatgtttgaggagtttgaacgtcagtgtcacttacccacaaagttattcaagttgtaaaaggttatacaataatttaacaactaccttttttattctgtcgggttactgacctcactttatgtaaatacttcgcatgacaaattcagtaactcgtctatttcagcatgcataagacttttcactagggaaactgataaagcttgagtcaactaaatctgccttcatactttatcaaggggaaccaagcctgctgtgcttacatcagcatctggaagactttcctctcctctaatctgtgtacacatctccaagcaaggaagaaaaaacaaactctgctcagacgcctatgaaacacctgaatgaactttgatgaagtacagtctgagttaccatcatgcacaagtagaactgctcttggacttgttttcctgttgtttgtggaacctacgcgtttgaatggcttgaacgttgcatcttttaaagttattttttaaggtttcttggcatttatcctagttgtccgtgtttggcaatgtgctgttaaagtaatagacttttaatctttatgtattttttgttttctctggagtacttggacagatgttatagtggtttcttttaggaaaatctgtcattaaaaaagttatagccttgcaaataaccactcacagtatttgagtcacagtttattttagtgagacgtaaagagtgctgacttcatttatttttctacctatatacctagtggaaaaggggaagactaatgttttcaaataaacaaacagaaacctaacagaacttaacttatgggttggcaaatttttggtgcttatgtgtaagggtggatgtatttgcttatggtcacaattggactctttaggaaatatgactcaaagctgtcaaattctattacattgatttgtagcctgttagcttagtaatggataatgttataaa

SEQ ID NO: 139280 - DNA, 1050 bp, Homo sapiens
actcctctcactacattagaattgttcatttattttatccatctcccccactagacagtaagccataggctcagacacccttgtctcaatcgtctgatttcccccagtgttaggtatactgctcagcaaaaagtagatacaggaacctaccaagaatgtgagggatgaacaaaggagcgaatgaatgaacaaaccaagatcaaacattccctttactggactagtgactgccactcattttcttctcttctgctttacccacagaagaggaaaaaatacctttttgagcattactctggtggctgtcacagaaggggtgaattctgctttcaaatgttttggcatttttttgactcacagctacacaacctgacaagatagccaactagctacttctcatgtttctgtggcatgcctcatgcactgctccatggagccgaccaaaaccgtattggctgggagatgtaaagtgccaaaaacggacctggcaaggagaaagaagaggcgatctgcttggagttgccattggtgggcacacaaacctgtgagtggctcgtgcgtgcttctccatggccatgcaagcttttgccctccctgcacttcacagggctgggagagaatggaaagtctatgtttaagatcagggtaagctcacgtctgtaatcctagcactttgggaggccaaggcgggtgtctcacctgaggtcaggagttcgagaccagcctggccaacatggtgaaacctcctctctactaaaaatacaaaaaaaaaaaaaaaaattagccaggtgtggtggtgggcacctgtaatcctagctgaggcaggagaattgcttgaacccgggaggaggaggttgcagtgagccgagatcccaccattgcactccagcttgggcaacaagagtgaaactcattctcaaaaaataaaataaaataaaataaaataaaaaacaggataagttgagaaagaagaaggtaaggagagggagaaagggagaattacaacaacagaattaaggccattgtcattttcccctttgatctgaatcg

SEQ ID NO: 139281 - DNA, 1030 bp, Homo sapiens
tgaggctccccccactattggacaccaaattctgcaaatgtttatggggctgttctcataagcccagcactacctaggttttgggaatccagagacaaatcagagagcaaggagctcagggtctagtggaggaaataagtcatataatcaaataaatgactcgacgatgtactaggtacaacaaaagaaatatgtataagatctcaaggtagcacagaagagggggtgctgaacacacttgggaggcccagtaaacagccaagggaggctaaattttgaagagccagaagggcccttccagaacaagaaacctgcatgaccaaatgcccagagacacaaagccacatgccagaggcttcatgccactgggtctttggggaataagaagacctgttattttcgagcctgaagtacaaggtagagagtagtggacattgagatttcagcaagggcagttcagggtgagctttgggaataagtgtttcggatttgagccacactaaaggtatgtaaacacaagaaaggagatgtctgtgttaacttgccttgataatgcccctcttgttacccaatcccactggtttcaacttcatcttctgggaacctatggtatttcaaagacactgcctgatccctttctagacaaattttatgcttttggaagtggcatttccccgctaagtactttatactgttttcttacaactttgcaaagcatctgccatatggtatttctcccaagtgagagattattgcctctttattggagggggggagctgaaatgaagtcatctgtccactgaagtgacagctgcaagcagagatgtactctctaggcagcaggcctgccgtcagagcccaacccggtgcgccttctccaagagcggctgtcccctcccagcctcctgtcgccgctttccctttcttcttgcttcctgttatataagagcatttttgcagagatgagctctgggcttgttctgaatattttaggtgtcaaacatcctgtttttctctgagtaatgtgacc

SEQ ID NO: 139282 - DNA, 1021 bp, Homo sapiens
caggcacaacagaactatttgaatgtctgctttaaagtaaagatctgctcatgtcgttgcacgaacagtagggagcaggaaagctgcatggagcaaatgctgggatgggacagaggagactcctgctgccagccacgagaaggttaggctgacctgatcagctattaggaatctttctccctgggtggaaggagccaaggtgcaggactggcattgcaaaatctggtgatagaaggccaaagagtgcttctgctcggtgacattaatagggtccaggagattttcttctgatttgccctcaagttcagaacaacctgtgggaagccagtgtaagaatgcttatactggataagcgttctctgtcctcttcatttagccacagtggcttgtttatactctgtgatgactcagggttcctcaattttctctttgagagagggacattgacctttgaaaataatgaaggaatctaagagaaggctcatccaggcacgatacagtaatggtccctcctttttggtgccccggtctctgtgcgctcacaagagggaatgtaacctttgccagcaccatacctgtcaggctttgccatttcatccctcaaaaggttgctgcgtttttgccttcaccttcaccctgcccacccctgcatgcagccacatggtcagtgtaggtacttagatttcagttagggtacatgctcagcaggtgacaagaattgcctttgttatgtctacttgctacagaattctccccaggttttaaaatatatatcttcaaatacctaaatgtattaaaccttaaagagtaaaaagcataggacaaacttttagaaatgctaaacctgaattttatccatttcatcaattatggtggtagtcggaagtccttccaaggccctcgggcttgaagcaagctcggtgatacaagctttcagcagcttccctctgctgctggagatggaatcttcatttctgggtctaaatcctgccatagctctcattcatagcctttacctata

SEQ ID NO: 139283 - DNA, 1052 bp, Homo sapiens
agggttgagggcaaacatttcagaggaaggttactttctgatgatggtacctgattaagaaaaggatacatcgacaggtacgggtgatttattttattctggcagattcctgtagtctactttggtgcttctcacactttaatgtgcagattctgatgcagcaggtctagagtagggcctgagatcctgcatttccaacaagcgccaggttataccactgctgatctgaggacctccctctctttgagtagcaaggggactctaaaagcaatcctaagaaaaatcagtcaggcagtgatggtgctaatgtttagaacattcacttttctctagcctgagaaagaaaaagagatacgaaccagggtattttgggttgaatcttcccagataaatctggatctactttgagttggagcagaggagatgaaaaatcaattattttcaatacagtatagcacatgggaaagataaatctaactctgattttaaaatttgttttaaattaagtgcttctggtaaaaaaaaagctagatatgctcaggaatcatgaaatgtagggattagagcttttaattttaggaaaatatggggctgttagcaaacttgtaaatcagaccacagaaaataggataattatcaaatccctggttatatgataaccttgtaagctataaaatgattttaaaaagttggaaagaaagaaatcaacagtttcaaatatatacagtcctatattgaaaagtataattaaaatgaaaaagcacaccaggaaaaatctgtggcacagatgacaagatacataatttctatatcatgcacagacctcatacagattgtaagaaaggtgcgcacaggcctagcacgtggtaggtgcttcctaactgttggctgaatgaattatccaattgatagatgggtaaaagacactcaagttatatcacaatgtaaagaaatgcatggaaaacactcagcctcactggtatgcaaagataagcatatttgaacgtcagcaaggcacacttttactaagttagcagaattacaaaaagaaa

SEQ ID NO: 139284 - DNA, 1463 bp, Homo sapiens
tattatttagtgccagagacttagtaggcatttgctagagatacaattaattgaatgaaaggcattatgtaaattacaaaccatagcattaccgtggtattacacaggactgtcttaggatccctgttcctctaatatccatattcctgaattgttggaggatatgcttgaatagaacaatcccttttccttcactgtagcatgacattatttcttcccggcctgttatcagcaagtttttcgaacagaaaagttgaaattatacagtgaacgctcctattcctaccacctagagtcagcaattaaacattttactatatttgctttatcaaatatccaccatttacccatcttaatttttggatgcatttcagagtacgctgaaggcatctgtacgctttacccctaaacacttcagctttatcattatgtggtttcaattttgactttcttagagctgctttcaaatttgttgagatcctgacatttattttggtggtggctaagaagacgtagtaactcaaatgtgcaatatgctcagttttcagaccctgggagtttctctttgtttgtaactaccagcaagtatacggacacatacatatcgctgtcccttccccgcttcgttatatggtcacattatttgtattgttgaaatttggaaagccagcctaggaaatgcagttgaggggcttgtggatatgaatgaaatcaaagaattggggttgagaatagtagggcaaaaggttagagttagctactataaagggaggatagagttgggtataaggagtggggaagagattcagatcaggaagttatcagcatgataccactttcatatatgaagtctagagagggtttggtggctgttcatatgacctaaaggtcatggattgaataaacactaagagtgcaaatagtccttccagtctagtggttttcatattgtattccatggaaccctagaatttatagacatgtctcagaggttttaccaacatttgaattatactttcgcaagtatattgaactatttttaaaaacactaataagaaaacccaacaaaaacacttgactgtgttttatagaaaattttatcatcctggagaacacatactgattgactttattttattttattttatttattatttttttgagacagagtctcactctctcgcccaggctggagtgcaaaggcgtgatctcggctcactgcaacctctgtctcccaggttgaagcgattctcctgcctcagcttcctgagtagctggaattacaggcgcttaccactacgcctggctaatttttgtatttttagtagagacggggttttgccatgttggccaggctggtcgtgaactcctgacttgaggtgaccccacccgccttggtcccccaaagtgctgggattacaggcgtgagccaccgcgcccggccctgattgactttaacataa

SEQ ID NO: 139285 - DNA, 1108 bp, Homo sapiens
cttcttcaagttgttactaaatctccagccctttaaacaacagaaataaaaagtgttccttattttaatttttccgaaatgaaagtcctataactaaccttggcttaattttttcttttgttgagggctttccaagttattttctttgtgaggaatggaggctaaaccatgtcagttgcttgaagcaactaaaaataccccgtacaaatatgcagaggagtatgcttttgatttttagatcaaaacgaagaagcaagattttatggagcttgcttattatacatttattatactgagctacttgtgccttttcaaataattaaatattaactaaatacaagaggattaaatagctagactttaaataaaactaaaatagccatattagtattttctaaattctgtatcattgaaagtttaggctgatatgaaagagagggaattcctatcatggggattgccagtcttttcacaaagacctgccactagattttgtagtatatgataaatgtgtgtgtgtttattgtgaaaattgtgtgagtcatatgaaaaattaagtctacttgaaaaatcaaaagacattacctacttgggtacaaagcctgatttatatatatatttctttaatgaccatattatgttatgttaaagtttgtatagtacttggacatatattatttaatttcattcctaaaacaattcaatagggaaagcaagacagatattaatattcccatttcatagatgaggaagaaaaaataacttggcttgtaagcaattcagcagagtcagagattgcatttgagatttttgattctaagtctagtgtgctttccttgggttacaacacaataaagtcaaaaacatttactgttattttcattaattgaaagcttaaaatcaatttaaaattctaacagtataaaatttaacagtataaaaatattgttaatttaattttatgacgttaatttttaaattgatttttgaatttgctaaaagtgttttaaaatcagtatcctgtttcacaattcctgaattaatctcttctctgtacatttcctgttccagtatgataatttatataggctttagcatttacttatgg

SEQ ID NO: 139286 - DNA, 1051 bp, Homo sapiens
agaatacttttcactatgtattctttcatacttcttcaaaaatacatctttggaaataaacccatgcaaaaaaaagaatgttcacagcagtattatagtggctaaaaagtggaaataacccaaatgtccattacctgatgaatggttgaacaatatgtggtgtatctgtacaatggactattattcagccataaagagaactgaagtactgatgcatgctatagcatgaatgaacctcgaaaacattatactaagggaaagaaatctgccacaaaaagctgcatattgtgtgattccatttttatgaaagcattatgctaagtgaaagaaatcagccacagaaggccatatattgtatgattccattgccagaagtggcacatccataaagacagaaagtaggttagtggttcccacggggtgggggtggggtatgcagagtgatggctaagaggtccaggatttctttgggggtgatgaaaatgcagaatcagatggtggtaatgattgatatacattatgaatatactaaaagctgctgaattgtacactttataaaggtgaattttatgatatataaattattttaaattttacttagagatggggatctcactatgttgcccaggctagtcttgaactcctggcttcaagcaatccttctgccttggcctcccaaagcacaggcatgtaaattatatctcaataaataaaataacatagcaaaacaacttgaagtcatgaacatggaaacttaaagaatcactgtgaacatataaaacaaaagttttcacctaagaaatgtttttattctaaaatattttacatattatctctataatgacaaaggacttcatgttctttagctaccttcactcacactcacctggaattatttcattttataagtgaagattgttaacccaaatgaagccctgattgataaaattttgggtaaaataactaaagaaagaatgtgtgattatctggaattgagatgttgtagctgcaggccttgcccaggctgtgccagtaggagaggaggtacgga

SEQ ID NO: 139287 - DNA, 2005 bp, Homo sapiens
ttcactttatgtactttcagtcctctggaaatctggatttcccctgctatcaaaatagacaatgctattgcctaacaaaatatagacttcctgagtgacatccaggtcacggcttgatctctttcctcctgctgtgttcatgcttccacttccgtgcaccatgttaggttcagatgatctactgaccaaaccccagagaaccactcatgagtcttttcaacctttaccttgaattctagggctatcttctatttggggtttgaaaacaccagtgcataataaagtaatgtattaattatagttttttggtaaataaagatagatcgtatgttactagccttgatgtttcacacaatgaagcagagctcatgaattattataacatccctgatcaaggcagttgatctcagttatcagcattaagaataaaggtatggatggaagcttatttgatttgttcttctttcctattatggatattaaccagctgggtaaattatagaatagggtcatggaatgtttagccctcaagcatttatcagaggcttaaaatgttcataaaaggtgggcttggtgaatgccaggacttagcatggttgaaagggtgttttgagtcatggtacatggcaatatggaaataaaacagatatgtcacaagtaggtggtagaaataaactggaagagaattttaacatctaaaatgtgacaaagatttatccttaccagcttctcagtttcctgaaacatttattttcctttgattttagattctgtatttatgttatatatctctttctaaaacattttcttgtttctgttttctttacttcttttacttttttgccacttctgttttttgaaaaatatcatcctaggcatgctctgaaagtcatttgttcggtgttttcctgatagtgatttctggttataggcccataaagtatctgtaggatgtggttaggatagttcctacctcttggtaaaagtctagtagtaacacaggaagggcacagactttggggacaagagacatttaaaactgttactgatcatgacattaccaaaaatcaaaagacaggggccatggctcatgcttcgtaatctctctgtgaatattataaggaaaattctaagccctggtcaactgtgaaatgaacaggtcttcagtggagttaattagcattttccaggtgctttgctgtttacagtgtcctttatttcatgtatcttctcatttgttacaggtcttctttcataccttttccttttctctgagattcagagaccctttggggaggctgaatttcaggtttgttttcattaggaccttacatgaccaaatcccccctcttggggttccaggggtgctccttcattttactctctgatgggtatgccatgaattgtgacatttaagcagtgactttgcaaaattggacgtgtcagtaggaaaaagtactcttcccaccttaaagattgacaggaacatgagatggctgaagctgttctgagcttttttctggcaagagtacataggacaagaaatactctggagagctcaacattgaatcacatcatatcatagtgcatgactagttgccttaatcttgcagttggactcactcaggagaaattgttggcagagggattaagtagcctgacaaaattatattgagaaaaaaacttgcagtctattaatttattagtagtagatatgagggaaagaagagtcatgtaaaaaaaaaaaaaaacaactggacatgaaaccacggagaaatccacaaagactccattacagtttgttatcagcctcttgcccctggccatgactaatggccagtaattgtctgaataagtttttaaccatttggaaatttcttcaggaaaagaaaaatctagtaaagggagaagggtgaccacaagtcaagctgtgaatgaggaagtcctgaaatgtgggctaagtgggtcactgaatttgccgtgtttgattcttcggttgcaccac

SEQ ID NO: 139288 - DNA, 1033 bp, Homo sapiens
gtttgatcctcccagtggtgtttctgaggtagagaggctaggattagattgcagtgtgagaaatcccacaaacgtgattctactgtaatcttactgttctctctcgctccttgataactgggatcccattaaagggggttcattattgacatctcagaagaaactcattgtgaagtctaaaataaagtgccattcttccctacaccagctctgcctcccatattccccattattttcccagtcacccagagtcacaacctcagagagatccttggctccttccccttctttcagttcttgtagccctgtcacagtgtcccttatatctagtttttcctttccatgcccattgcccctgcctctcattctttcagtctttccttgcatctcagtggacaattgcattaccctgtgctgtcttccctgcctcctctcttctctgagatctgctcttcttatcactgcttgcatgactccatctcattctccccttgcaccagttgcagaaagatcctccgtgtgtggctttccctcctctctagctttcggtcctactacttccttatcttgtgcttctgtcacaccccaaccccccccagctgcatcctgcttcttgaacacgtcctgtgtttttctcataccttaggtgacatggtaccattttcttggaacactccctcccccttgtctgcatgccaaagtcttaatcattcttcagggaccaggtcaaatgccgtgacatccatcaagtcttttctcatctccaaaccagatgtgatctctccctgtgataaatgtcagtaacactttatacctttcttgtaatacttgtaaggctctgccttgcatagtagtcatttgcatatttatcttgttacacttgaaagtaaggactgtattttattctttgtgaccagtaaaataccttgcaccacatagtagggcatctgtccaataaatgcttgtcatatacaataaagcaatggctggggcggcattatctacaggttaacccaataataggtcataatgt

SEQ ID NO: 139289 - DNA, 1092 bp, Homo sapiens
atttggtaccttttgggtggcaggattctataggaaatgccttggcaaagggagctgcagagtgccttagtaatgcttgggattgcaggcgtgttgtctagggccacagccggggaggggaccagggagggaagaggggttgttcatacggagggagtggaagggattcttggaataattttttccagactctattttaagattataatttttaagacagcaaatatcccaaatggtaatactggttacacttctatgagcatattgattctcacttgcttgactcaagggagggtttgattttggtcacaaagccacccgtgactatgacagataattcaaggttgccaaacttgcctgtgccaattgacaaagccatttatataagtcctctcttgctatattgctctggcctcaaaaggcagtaaactctcttggacaaaactctttaggatctattcagggatttaacacttttctgctaaattgcaagtaaatttaaacattttaaacaaattaacaaggattgcttaggtacctggtgtggtacagaatgagctgtcagtttctattctgatgaatagaattttatagataggaggaacgggaggcctccagaggatactaccctccctaaaaagagacggaggaagagctgaaagcgggcagagaggcttcttgatgacaacgtggtgggcttagagaagctgctgcctgcaggcggggcccctgctttcctgcacccctttgagcctctgccccacactcttcctttgtataaaacaactgcttcttgcctgcctgccccatcacacccctccactccatcgggtcactgctcaatggcacaatagcactgctcagccatacctcccagcatcctgtcccctatctggtgacttggccaacacaggctctgatccacttgccccgctccgcatcttttgtgaatcagcacagttgatatatctgagcaggggcttctaccatctccccagggaatcactagccatcggccatctggccccgcggggtgcttttgttcctggaatcatagtgaagtatctgttgtcttggtgcctggtagtcagc

SEQ ID NO: 139290 - DNA, 1608 bp, Homo sapiens
ttgacaagttctgtgccaacacctgtgtggaatgccgcaagcccatcggtgcggactccaaggtaacgggcatccccatgtgccaatgggaagggctgggttttggagtgtcctttgcccacaaccatggcagcagcagctggctgttaggatttcccagcatcactgcagccaccttgaggcctcaaggaagcctcctccactccccaggccacagtggcccgagctgtttaatgtggggcttgactggatgggcgccagcgcccttgccagctcttttgattgcattctaaatatttcaagaattgtgagatttttatcctcacctcagcgtccctcctataagaatagtcactgtggggcagtcccaggtgtaagggactgtgtcatctcagtggtcagtcccagggaaatcagccttatgggagggctcctgccaccacccccagcacccctcatggtggcccaccctgtctgcttggtttccaggaggtgcactataagaaccgcttctggcatgacacctgcttccgctgtgccaagtgccttcaccccttggccaatgagacctttgtggccaaggacaacaagatcctgtgcaacaagtgcaccactcgggaggactcccccaagtgcaaggggtgcttcaaggccattgtggcaggtactgcctccttcccaccccgggttcccagggaggaggccctgagggcagacgtgatgtgggcttgcttatcatggtggggctaacgttgctctgagctgctttgagatcttagcatatatatgtacacatatacatacacgtatatatgcgtacacatatatgctcgcacacacgcacacactcggagactaaagaacactggcgagaacagcctgtggcaacagaatgaagtgaacagtatgtagcgctttctcatttgggcgtagtaagtgatgaaagcatgcttcttcctcagggtgtcattctgggccaggcagtccctgatttaatgtctaagtgcacgcagggtatagaggtgggggagtgggggattcaggcactggatcctaaaataataatgctggggtccccacccatgacagaaatcctgggttggcacaagcacaagtagaacacaggtaggttagttggaggtgtgaggccagtaactgcagggcctgcatcccctcacctctggagggcctggggaggggagctgagtggatgcagccccctgcagagcctgtcagtggggctatccaattgcttccctctgcaggagatcaaaacgtggagtacaaggggaccgtctggcacaaagactgcttcacctgtagtaactgcaagcaagtcatcgggactggaagcttcttccctaaaggggaggacttctactgcgtgacttgccatgagaccaagtttgccaagcattgcgtgaagtgcaacaaggtatgctttcaagggagttctgcattgaccgttgtttctagaagtgtttgacagtttgcagagcacttccacacacactatcccattccatcctcacgacagccctgtgacgtaggaattattattcccgttttacagatgaggagatcgtggattaggaagcagtgccacag

SEQ ID NO: 139291 - DNA, 1026 bp, Homo sapiens
tgctttaaagtaggaacgctcagaaaacatgccacacggggaaaccaaacgttagtacggggaaaggtcagtttagaattacagctaagttcaaatgttaattttctggaagttcgtgttagttatttgaaagcacaaaagaacagaaggaagggcagagttctgatgaggaagttaaaccatgcatgtcagtagggttcttttcctgctcacagaagagggtgagcagtgagttggagcagccgctgcaactcttgcatgtcgtgtgtctacacggtgggtcccagctgaggcatgagaggcatctcagtgggggttttatctcctatgcttcttgcttacatcactaagtggctaaatgattagcacttttctgctctatgagaaacatgcagaagagtcaatctacctaagttttcatttttaaattgcagccggacagaaattcactttgctgcagggttgctttttgctaaatgctaatatgatcactgtgtgcccttatttgagtaatactgtaaaatgggagaaaagacggaaggagaactttaaagaagggaaggaccactcttcccctattgatggtatagggcagaaagtaaggacacaaagaacgagattcaaatgccattttacaggacaggagcccctgtcagtttacagctttttggcacagtcgggacaatacacttgctcctggtggaaaacaaagcgcttgttggccagattcacggagcattttttgcagtggaagcagtagtcgtgccaggattgtccttcataggccaccacactggagcctttaccaaaccctggggggaaaaaaaaagaaaagaaaagaaaacaagagaaacagctgaatgaatacaggtgaggaaaccacgattcagagagataaaatgacgacctgccccactcacagaccgacaagcacgcaagagccaggtctgcctggctcccagaccccctcctccactccatcgtgcacagtcccccacgccgccattgtcccccatgccgccgcaa

SEQ ID NO: 139292 - DNA, 1101 bp, Homo sapiens
caaaaagctgtaaactgacaggggctcctgtcctgtaaaatggcatttgaatctcgttctttgtgtccttactttctgccctataccatcaataggggaagagtggtccttcccttctttaaagttctccttccgtcttttctcccattttacagtattactcaaataagggcacacagtgatcatattagcatttagcaaaaagcaaccctgcagcaaagtgaatttctgtccggctgcaatttaaaaatgaaaacttaggtagattgactcttctgcatgtttctcatagagcagaaaagtgctaatcatttagccacttagtgatgtaagcaagaagcataggagataaaacccccactgagatgcctctcatgcctcagctgggacccaccgtgtagacacacgacatgcaagagttgcagcggctgctccaactcactgctcaccctcttctgtgagcaggaaaagaaccctactgacatgcatggtttaacttcctcatcagaactctgcccttccttctgttcttttgtgctttcaaataactaacacgaacttccagaaaattaacatttgaacttagctgtaattctaaactgacctttccccgtactaacgtttggtttccccgtgtggcatgttttctgagcgttcctactttaaagcatggaacatgcaggtgatttgggaagtgtagaaagacctgagaaaacgagcctgtttcagaggaacatcgtcacaacgaatacttctggaagcttaacaaaactaaccctgctgtcctttttattgtttttaattaatatttttgttttaattgatagcaaaatagtttatgggtttggaaacttgcatgaaaatattttagccccctcagatgttcctgcagtgctgaaattcatcctacggaagtaaccgcaaaactctagagggggagttgagcaggcgccagggctgtcatcaacatggatatgacatttcacaacagtgactagttgaatcccttgtaacgtagtagttgtctgctctttgtccatgtgttaatgaggactgcaaagtcccttctgttgtgattcctaggacttttcctcaagagga

SEQ ID NO: 139293 - DNA, 1762 bp, Homo sapiens
ccactgcactccagcctgggcaacagagcgagattcccgtctcaaaaaaaagaaaaattagaggtaagacgaaatgcacaaacagaattgtctaggtgagtgatcaggggaggggtgaaaatctggagcagtcttatctctggtcattattctttcctagcaaaggaaaaaggacagattccttaaacgtagcctcttggtgcctcaagggcagggtgagtgtgtgtgctgagcagtggcctgggacatggcttgggaaactctgtgactgctgggcctgcctcccaggagtactgctgcttgactcttcctgccttcaggcaggcagtacccactccccatcccatcaggatcatagccttcactttttcttgaattctttattgaaactccatatttaattgtgtaattttttttcctagccattctaaatggcacaggctcacctaccaaatttaaaatgccgttcaacaatgccaagaaaatgacacacaagctggtatttctagaagatggtaccagccaggtccgtaaagagccaaaaacatattttaatggcgatttgaaaaacttcagacaaaaaagcatgaaagacacttcaatacaggaagtagtttcaaggtgagtcacttagccagcttatctaaataaacttggcaggattatgattgacaatcttagaatgctagataaatatgatctcttgtgctcttagtttgtaccaaacaccatgtcacatatttgacttaacggaaataaactcatccccacaacagccttgctaggtaaggatcatcatccccatgtataaagacaaggagactgagggtcagagaggctaggggctttatttgcccaatatcctgctattaaagggcagagcccaaattcaattccagatacatctggctccaaactttacttttgttcacattggttaatgttatctcataaagttgggcaagaagacatttattgagtgattgctatataccaggcattttatattacctatttcaattatcatcacaactgtgagtgtgacagtaatatcctcattttattatttttttatttttcattttttttttaagagttgaggtttcaccatgttggccaggctggtcttgaacctccttggctcaagtgatctgcccacctcggcctcccaaagtgctgggattacaggcgtaagccaccacacccggccataatatgctcattgtcaatgtaaggaaacaaggtcaaaagttaggtcaggagagcaggaactgattcatggaaaggaatgctacatgggcaattgcctgagaagacattcacctgcaaggcccacaggaacaggagtctgctgagaggtgtgatgatgtggaaggagcattagagctagaggacctgtaccaattctgttactacacctcactggccgcatccttgaccaatgtaagggaggggcatggtttctggagtcctgcgtgcttagctgctcctactcctggtgcttccgtgggacctagggctttctggaatacagtttgaaaatcagtgtgtcctgtgatctctagggttcctttcagtcatcctgttctatgattctgaaatgttttttaattccaaggcatttcttagaagttaattaaaggacaaagcttcttttaggccagagccttggtttgggaataattgggattctaaccaaactgtctctttccagaccatcttccaaaagaatgaccagtcacacaacgaaaaccagaaaggc

SEQ ID NO: 139294 - DNA, 1109 bp, Homo sapiens
gcctccacctcccaagctcaagcaatccacccatctcacccttccaagtagctgagactacaggtgcatgccaccacacctggctaattttttattttttatttatttatttttttgtagaaacaggattttgccatgttgtctaggctggccttgaactcctgggctcaagtgatgcacccgcttcagccacccaaagtgctgggattgcaggcttgagccaccacaccctgcattctgattttaatgttcttgaatttaccagtattttctgatgactaatgaagttaggcaccttttcataaatgcttagtggcctgttggagatttgctttggtgaagtaccttttcaagtcatttgcccattttcctattttgtcacctgcctttttctgattgaattgtaggtatttttacctacactggttaggagtcctttggatatatatattgcaggtatcttcttccatgccatagtttgcctcacactctcctaatgtctattgatgaaccagacagaagttcttcattttaacaagttcaaatttatcattttttcccttatggtgagtgtctttgtggtctgtttcatcattatttgcttaccccaatgtcatgtcttttgatggagcacatgtattcaaggcctttttcctccagattctgtgctttttacattctatgctacaagactgatattttgtctgtttgtaattacccagttgtggtcatttgcattaaatgacatgagaatttagagtagaaatgccattttcaaaaagcgctgggagtcatcatgtcaaagttcattcaactcattgggagttttccctcaagcagcaaccaaaggctgggtgcggtggctcacgctggtaatcccagcactttgggaggccaaggcaggaggatctcttgagcccaggagctcaagaccagcctgaacaacacagtgagaccttgtctctataaaacagtttaaaaattagccaggtgtgttggcacatgcctatagtcccagctacttgggaggctgagacgggagatcactcgagtccaaaagtctgaggctgcagtgagctatgatcgtgccactgcactccatcttgggc

SEQ ID NO: 139295 - DNA, 1048 bp, Homo sapiens
gaatcagctgaagactaaagactaaaattatgttaaaagctctaattggttcgcaataatatatgcttagtctaatgaatttctgcatatgcaaaattaggagtgagatgttgtcatttgaatgtttgtgttataacaaatacagcggtcatcattcagggcattttatagctgaaactgggattgggataggggactcaactgccaccgtaagccttttgttggtaatatttgtggttttggagcaatcactgccattgtgcacctctgtgaaatggggataatcaactcctttaggacaactgtttggtttctaatctgttttcatgtttgaatttttattttcctttaaatagagaatagaagaaattatgaagcggacaagaaagacagatgtgaatgcctcaaaggtagtctccatactcctaccagcagtgtataagaatgcctcttgtttcacattattgccgagtttttcactttacccaatctggtggtaatgaaataaagtattacatttgcatttccctgattatcaacaaggttgaccatgttttcatatctttagttagctctcatatttcttttgtgtgaaatgtttttttttatcttttgcccaagacttttgggttgatttgtctcattgtggttctttaaatgttatagatactgcttcttttttggttatgtgttgcagataccttctcccagtttacagcttatcttttctttttctttttttcttttttttttttgtatacaatgtgtaatgatcaaatcaggataattagcaaatccatcacctcaaacgctgatcatttctctctttttttttttgagacagagtcccgctctgtcacccaggccagagtgtagtggtgtgatctcggctcactgcaacctccacctcctgggttcaagtgattctcctgcctcagcctcctgagtaactgggattacaggcatgcaccaccatgcctagctatttttgtattactattagagacagggtttcaacatgttggccagactggtctcgaaatcctga

SEQ ID NO: 139296 - DNA, 1040 bp, Homo sapiens
ctgagctcagactatactcagtttgaattattaccatagcccaatttatatttccagtttttagtgtattattcaccagcattggtcatatgttttatatatgattgtttatgcttgcatttctcaggagggtgccttcaagaatcctctcagtgcttttgagaaatgtcaggctgttggctcctgttactgtgttaatggatagctccacagtcacatactttgaattaggatggtgtgatgttcataacaatgaccctgtggtcctgaatcctcaggataacatttagcctagctttgtgcattctaactagtgctttgaaaattgacaatccgcaaatatcatgatataggaaccctcattcaaaaggttacactcttttgttatactagataacatttaccattgaaatttttaaactagagttctctgatgtcactcaggtatcttgagattgaatgatatttttatgcaaatttcctagaaaggggacgccaaaataaaagctcaagaggaagctgacaaacgcaagaaagaacacgagagaattatgttacaaaatttacaagaacggttagaaaggaaaaaggtactcgctctctgtttggggggacttgattctgtgtttaaaacaatgttgggcacctgatatcagcatgtttttaaaaatcacaaatctgatatatgctagttcctggtggttttcccactcgattctcttccttatccaaggatctgacttctcctacatagagggctgtcctcttactgatcatgcctccctctcatggacccttggtggccattggccattacagtgatgcctcactatatcaaacctctggtaacaaaacttctctgagcagaaggactccagtcatggtaggggttggtagaagttaagactttcttctaaactggctggaaattgcagcaactacatggggagaagcacaaactgtaggcctctttgagaggccaaggtgcaggctatttttaaggtagggccacatgtgagctcatctgcagccctggtcca

SEQ ID NO: 139297 - DNA, 1031 bp, Homo sapiens
ttttacaacataaccagcatattatttacaatattctgcaatataattaataaaataggttaactcacttaaactaggaatttaaaattctctgatgttcattgtaccacttttcctccaaagctgaaatattagtgagtttttattagaagggagaaaatgtaagtttatatgaactctgtttctaaactctgaagaaatgttttttgagaaatgttttaaaccctgagttaggatttggaaattgagtttggttttgaaggataatatttcttttaaacctgttatttctgtgatctcctggaattgtgtaatgtaaattgttagtccagaagcaaatatcaatgtcctgattctcatactctaaaagaaaattgcagtttaaagaattctaattgtgttttattcagaatgtttttctcttcaaaaaaaaaaaaaaagccagctgcagtaaaagaattgtttgttagtaatttaccatactgtgtttatctgttcagaaatcagaaatggacaaacaggccttaatccctattgccaagaagcgtctatcatcatacactgagtgttataaatggtcatcatctcctgaaaatgcttgtggtctgccgtctcccatcagcactaagtaagcagcttattcgcaactgttcctgataggcgttttactagaacaaattccatgtcaatgtttgatgagtgaaataatatagtatgcatggtaacacaaatgtaaagggaaaaaagcctgtaaaaagggatttatttttcagaaaaattccctgattataatgtcatctcataatagcatcttatattttatgaaattgtacactgaaaattaattagcaaatgtgtattactttttctcagcaggcaaatccaaaagaactgccctccatcaccattaccacttatttcaaaacagtcaccacagacttcttttccttataaaataatgcctattcaacacaccctgtctgtgcaaagtgcatcaagtactgtcaaaaagaaaaaagaaacagtttcta

SEQ ID NO: 139298 - DNA, 1472 bp, Homo sapiens
ttttttcctaagggtaaacctagaagtagaattgctggaacaaacagtatgtactttttatgctccccagggaaaatatacaaatctatactcccaccagttgtgatgaggttgcctggttccaaacattggtattaatcgctttcttccatcttacctggcaccaaatattatcattttcgtccgtttcataggaaaaataaaattagattgttaaaggtggaaaggaccttggagatccaacccactctgattaatgtcttattaagtttttagtatgggtgagaaaatgctctttcttacattctattctaaaacattaaaatatggagtatcttacataatcacctataatggtaagatctctagccctggcgaagatgtttagattacttttagaaagggttgaagatcttgtaattttttgtgaaaattattctgaaatatagtatgattaaaatagaaacagcttattgcaaacatcaactttggagaagcatcttattttcatctgtaatagactattgcctttacaacgactgttgttaatgttgcttccgaagtagtgactttgtgatagttctgtcctgtgtctgtcatccatttcactaagcatttcctgtgttgtgtgtaatccctgtgctttcctaataaacaatctcttttctgtgttcctgttcttatactgtgtacctggtgcatccttttcttgtcagatttctaacttagggaatttcatgctctgtcctcattcagttacaggcgtcaccaattatgtaatgcagtatgtcactgtacccttgcgtaaatgtactagcgacgaattgagggctgttatgtttcccatgtcgacaatgaaaatacctcctcaaacaaaagtagaagagtctcccttggagaaagtagagacacctcccaaggcaagtgtggatgcacccccccaggtgaatgtggaagtattctgcaacacaagcatggaagcgtcccccaaggcaggtgtgggcatggcccctgaggtgagcacggactcattccctgtggtgagcgtggacgtgtcgcctgtggtgagcacatatgattctgagatgagcatggacgcatcccccgagttgagcatagaagcactcccgaaggtggacctggaaacagttcccaaggtgagcatagtagcatccccggaggcgagcctggaagcacccccggaagtgagtctggaagcactgccagaggtgagcgtggaagcagccccagaggggagcctggaagcacctcccaaggggagcgcagaagtagcccccaaggagagtgtgaaagggtcacccaaggagagcatggaggcatctcctgaggcgatggtgaaagcatcccccaagacatcccttgaagcaagcatggaagcatctcccaaggcaaaagcgagagacgctccaaaggtttgtcaagtgcctgttattgacaaattttctattaaa

SEQ ID NO: 139299 - DNA, 1028 bp, Homo sapiens
acatgtataactcagataatttgttttctttatgttaagaacaaatatctttttatctaaatgattgatattggagtttcatgttttcatcattttatactggtgtgtgcacatgtgtgtgtacatgtgtgtatacgtatatatcttttttaaatatatgcatatataacaaaaatactagttataactaaagtgtaaattacttttaagtattaggcatcatgtctaaagggttgtatgtttataatttgggaactttgatgtcagatagtgtcagatattttacctcttaatttttaccattttctaaattttttttcatttcagataaagaataaactcattttaagcttggggatatagaatctctgcataatatttgaaattaagtcttataagcaaggtagagaacataaaaaatgtttgaaaaaggagtatctcactcctgagataattagtagtttatgaaaactaatattccttttgtacttgctctctagggaaaacagacaaggagagaagctcatctttaaatagaagagatagtaacctacattcgtctactgataaagaacaagccgaaaggaagccacgtggttagttacttctaaatacaaattttaaatagtgatttaaaagaggtattttatgtcaacattgaattgcttgaaaaatcattcccaaaattggaagccaaaatattccttcttagactgaaaaaatgtgctttggtgccatgcttatttggctaaagccagaaaaatctgtctttaaatgaagtatataattcctgccatcatctgacaaggggtggataatgcagctggggaaataaatcacagaatattggtatagataggagtgtactggaggatttgattcacttccagtatttcattaatttgtatttggaagtttaaatacccggccacatttcgaacttcaaagctttgcccttgcttcatagcattacccacatatatcctttgtgcatattttcactgctgattattcacagaatttcacag

SEQ ID NO: 139300 - DNA, 1152 bp, Homo sapiens
gaattttagctgttacagatgtgagtatactagatgattctggtataaatttaacttatatgtgtgctgatttttcccctgcctcattctacaaagaatttaaggtgacttaaaaatacataccacaccagatgataaaaataaatggttgggggaatcaagcagaggggaaaactaacataggcaaataaaacataaggtatgattagcatgcacaaaagtataccaatcagtctttgtacagttgctagaaagaggctacacatttggctctaaatttcctaatgatacaaacaaagaggaaagcatggtcattttcttaatgcaaggtccataagataaaaaaaaatgagttatttaggagaagcactggtattgattgatagctgagacatatctccaattattttaaacttttacctgagacagaaatttggttatggtttattttataaaccacagatcaaaattatactaatttgatgaatatgtaaaaatatgttggcttttattttaaataggaaaaatttacagccattctttatcgtactttggaacggaggagacttgctgatgattatcagcaaaaaagatggtcatggggaggctctgcaatggcgaattctgagagcaaaactggtaattaatacacccattaaattttaagtttgtttatgttcttgtttaaatattggctatgagtagaagcttgcatttacagcaagattttagtgtttgtatcctaaacaaaaatactgtatatagtaaatttaaatttctgtcatatgccattgcaaaagaaacaggtgaaatgttatagtagattttatttagctcaatatacctaaaatcttatttaaacttataatcagcagaaaaatgctgaataatgactaagctttacacagcttatcaaatgcatatttttaaaaataagtctgccttgtctactattgatttagtgtaaattttcttatatgcacataattctacacaatttcagaaaacaaaagtaaaatttatgtagtttagaaggattggccagttgccgtggctcacacctgtagtcccagcactttgagaggccaaggcgagcagatcacttgaggtcaagagttcaagacccgcctggccaacatggtgaagccccgt

SEQ ID NO: 139301 - DNA, 1050 bp, Homo sapiens
cattaatgtaaaactggcatgtttaatatggtctgtatagatgaggactttgaaagaagtttcctagtagaagggaacaaaacatgtatcctggccatgcagtttttaataattagtattttaatgtacagcatattaatatggtagggtttgactttagctcaaatcagcagaaatatcacatgaaagaaaatattttttcttaatttggaattgtagtttggacaggatgagagtcatttggcacagacaatccagttctccagagttaaatgaatactcagtgaaaatggttctgcagtggctacctctgttcacttttataataaatctttagttactagcacaggttgtgttattttaagaaagtgaatgagatgtgttaactttttccttctgtgtgtgtaatgtggaaaacctaaatattttcttggctcttacaccttgaaaatgtatttggaatatttcagccaataaagaaacacaactacttgaaaaagaaagaaagaccaagctccaatatgaaaaacagatggaggaaagacagagaaagctgaaggagcgaaaagagaaagaagaacaacggagaatagctgcagaagaaaaaagacaccagaaggatgaagcacaaaaggtacataattttgcagcctgtgcatgagaggataaactgtgttgcctgagtctagaatattgttttctcaggccttctctgccttacttgccctgtagaaagggaaccaatcccagctctttcttcttcgcttcctcttcccctcagcattatataggcttttacccatgtcctgataagatgccaggagctgagacccactagcctagggaatggggagacttccaaatccaggaacaaagccccatccaccttcaggacttggcacatgaggtacctgtggcctggggtttgttctgagtggctctgtttactaccaaaaagtattcactgttgtctcattgcctacagaataggggcagaccccactgtctgaccctccctgacgtgccctcatctgaccgatttctcacaac

SEQ ID NO: 139302 - DNA, 1134 bp, Homo sapiens
ttctgaattcccaatttatggtgaaacttaattttcccaattcctcgccagctcagtatttctaacacttggtgtaatgttttgtttgagacatttttaaaacctattaatcattggctcctactcatccacaaacttatgctgccaccgccactaacaactcaattatctttatgtctacaaataccctggcccatcatagtaaacactttaaattctttgttaaagtgttgttgaagatcataggtgttcaatatatctttgttgttgacccagatgaaatcagtcatgatttatagaagtgatcctatcctttatcatcaaatacaattggccgtggtttgctgactcctgtgttagctatccgtattcttaacatctaatccttttatctccctgtattttagttgctgcagcaaacgagattgctaaggaaaggaggaagcaagatgtggttaatcgtgttgcaacccattcctcaaatataagatcgacatttaaaccaggtataatttctctgatgctttgatagatgtcaaagtgtcatatctttaaaatttgatatcctattaatatctaactatattcttttttttttagtaatcgatggatccatgcttaaaaatgacataaaacaaagattagcaagagagcgcagagaggagaaaaggagacagcaagacggtatattttagaccttttttcaaaaatcaaaatgaattgtgttatatattgcaaagtgtttttaacttattcctcctaatttgtttatatgatagagtataatttttatattatgtattattttggattaaatccttttactaaatcaggcaagaaggcccatgaaaattctttgattaaattgtttaatttttgaaggagtagtttatcttagctttgattttctgaaaactaaggtctggaaatttcttcaatatttgtaaaaacaatcagaatgggatttcagtaaaagtgattcttttttttttgttttgttttgaggcggagtcttactctgtcacccaagctggagttcagtggcgcgatctcagctcactgcagcctccgcctcccgggttcatgccattctcctgcctcagcctcccgagtaactgggactacagtcacccg

SEQ ID NO: 139303 - DNA, 1028 bp, Homo sapiens
aacttgggtctttctttgtgtaatgtttcaaggactagtaaactcatgatacaagcgcacccaggaggcacgccgtaaatgttctttaaatgaatgaatgaatgaggaaggaatgttactgtgttgctaggtaaaggtgaagaaaggaatgttgggggggccaagctgggtgctgattggctagtcctcacaatgcagtaggggcagagcacggaacataggagagggtttctttagaccaggtagtcgctgcccagccggtcaggacgtgggacgcaaggggcaatcctgcccggttcgcaggtccgaggcgggcgcggtggcccttcgggccccgccccgccccgccccgccccgccccgcccaccggcagcccggccacgacccaagcggaggccgcgccgacgcctgcgcaatgtatgcggagagccaccaccgcctccggtcccgactccgatgatggcggacggcgccgcagctggcgctggcggcagcccatccttgagagagctgcgggcacggatgggtgagcgggcgggtggctcccgggggtggttcgggcccgcgtgggaggcagggttcccgcagtccccgggccgtcggagcggcgcagcgggcgccacaaaacttttccctggagtcgcctcgtgctatctggtcctcccctcacccccgccggagtgccctgggatgggacaggggcgggggcggggggttgaaattgtcagccgacgccgcgagccgcctgagtcccgccgccaacggtcgaactgccgctgccaacggtctgagccccgcggacgcggcgcgaggcaactcacgggctctgcttcgacgggcggggcgggggcggctggaagccggaccccgcggaccgccccgtgccccatctgcccttggggggcggtggccgcccgcgcaaccgccccaacgaacgcacagctgcctgggatgtgcgggcgcccgcagggactccgcgcgccggcgccgcctccgccgccaggcagcctttccaggcacggaaagtt

SEQ ID NO: 139304 - DNA, 2626 bp, Homo sapiens
gccgcatgccggcgtcggcgctttttgacgccatagtgggcgtgtcggcgcgacccgcgacgtcgccacgcgccgacaatggcggctgcgtcggcctgagcagggcttagtttagaagtaatttcctgacgttgccgagggagccgcagtcgcctcagatccggtcggcggcggcggcggtggcggcggcggcagcgcgcctgcgcgctcccgcagcgccctggacctagcggcggtgccgaggcccggcggagcaagccaggtgggcggcggcgcggccgagctcacagcatcagcgcgcgcgcgcggtgggcgggcagagaggggggcggtgcagccgccgagcggccgcgatttcccggggactgctggggcgcagcggggaggcgggccggggggcggcggggcgcgagcagagcgcggttgacctccctttctctgctcagctccagcgtcatttcggcctcttagttcttctgaaccctgctcctgagctaggtaggaaacatgagcggcaccaacttggatgggaacgatgagtttgatgagcagttgcgaatgcaagaattgtacggagacggcaaggatggtgacacccagaccgatgccggcggagaacccgattctctcgggcagcagccgacggacactccctacgagtgggacctggacaaaaaggcttggttccccaaggtaggagagtgccacgggcgccactgcagagcgggccgcctggccagcctcgcggggcactccttttacgtttgctttgctgagatccttggtccttggtcctagcccccttgaatagcgacgcttctttttgttgtgtttgttggggcaccgatgtgtaaaagaacgtaaatctttagggtagtgtcttaaatgtaatttttaagtcttttctatgctttattaatcttgtctgtgaaggtcacagttgattattacatgactgctttttattgcaaagaggaaaaataccaagaacaaatttagtagctgtccatttctggtagccaaccccacttgtcctaggaactcagatgtttagcttatgtactatgtgcaaaatgcagtttcttgatttcttttttaaagtagctgtttatatagctttactaattgaactttctttgcaccttgctttactttcctagtaaattttgtccctaggcatatatgtttgaaccatataaccacaggaataagactggagatacacagaatacagatggaaaatctgtgtatgtttgtttggaatacttggaaattgctaagtatttttatttcagcttcgaagtaaaataactaatgttaaacttgattctgtaaactttgtggtaaaagtgcccttttaatctggctctcatgagcaggaaagggcacactaatagcacacaaattgacttgcaagtcaatgatacaaaacctgtctccactgcgcgactggactgctattgtaaaaattcttttgcaacttttctttcccattctgtatttgtatatatattccaatccctccagattgttaaaatttacgatttcacttctgtgttggtagtgctagtttgagtgcagatttggtttcttcagcattctgaatacttttaacaaaggtgtgataatggattaatgtgtgactttatccttttatgttgttgaagcccatacctcttcaaactttgggttttacattttccccattccatgcctgcctaatattgattggtatgatgatataactatatttctttcgttttgcaataacgcttttcccccaaaggggaggaagatagatatgagttggatttgtctttaatttgttctgatactaaaatataacgtcatttaatttgtgataaagttaaaatgagcatttagttttacaattgttaaccccattctttatataccaaatcagagttctgttctgtgtgctctctgcatacagatatttaagtacttattgtacatgtatattggtgcatctgtacagtaagagaaaattggattctgtggttagattattcattgactgttggtttttattgttttattatctggttcttcctttgttgtatgtatttgtagccttagtcaagtagtgtagagaggtagtaattaataaatgaaacaactagaaaaggtgccagcatcacttaaaatgctttaaatcgtatctcagacttttgcattgatcatctaagtacttgtgtcttattttttatcaccgtatgcacaattttctatagaaggtgactattcttgcatttataccttaataactacaactattatccacagaaacacttttgtgttaagttgtataactatgctgtaaaaacacaatttaaacttcttatgagtggaaataattttgaatttctctgtccgggtctgttgaattgcttgtgtagattactgaagatttcattgctacatatcaggccaattatggcttctctaacgatggcgcatctagttctaccgcaaatgttgaagatgtccatgctaggactgcagaggaacctccacaagaaaaagccccggaacccactgatgccagaaagaagggagaaaaaagaaaggctgagtcaggtaagtggttctagcttacaaattt

SEQ ID NO: 139305 - DNA, 2528 bp, Homo sapiens
ctgttatttgaaagtaagttgtatgatcaaataagtttcttgtatcttcgtttttaactcaggaaccagggctataatttctatagatgataaccaacaccaagaactgttcaaaacaggatatgaagaaaactgaaatttcagttagtacctgtgtgtatcacattggtaagattattcacttgttttaagaaaatatgttatcaggtaaaagtattatataagtatgcgactggagtgcttcttctgtcttgaaaaattctcactagaaagatttttttattgatgtgtacagtcaattcagactacattttaaaaattcaagaagaaaaaaagccagtaacattttagttgtccattggaatgaattacaccagggttcagcaaactcgggctctgttttggtaaatacagctttatggaacacagccacactaattcatttatgcatttgtctatggttgcctttgtgtttcactgatagggttgagtggttgcagcacagaccttgtggcctacaaagcctaaaatatttacgaactggccctttaacaaaaggatttttctgacccttgaattagaccatgaaggagacgatagcttattcttactgctttaaaatatttttttgaatgtgagaaaagagagagtggtattaagagaaatttgcagaacttcatgtagtcatagtaccataaattacacaaagaaacctcaatgccagaggcagccatcatttctggaacacctgccaccttaggagcatgtgttatacattatcacagggtacagaacaaatgatgacatgtacataagtcaaacctggaaataattacagagtaaagtcaaaatggtaaagcaaaagtacaaacaccacaggtgtgttgtgagtatacagtattccagtgagatcagaagagagtaggattaagctgacagctttttgggaaataggtttttgacctgaatcttaaacgtgatggttatgggacatgagcatgaccattttaggatggtagttttgtaatgttcaaatgtaaggagatttgagggttttataagttctttaaggattattaaaaaatctgcgaacagattcttagggagttctgttagattttttaaatttttaaaggaaaaaaattgagttttgagacccatagaagtacaagattgtcaaaacagtaaattgagttccaggaaaatatagtgaattattccaggacccatatatgtgagcagctgagttcagttatccatttttcttttctacaggtcctctgatctttgactctgtttgtatagggctgataactgtcctttctctaagacctggaatccatacatgtatttaatataaagtacaagtcatcagataattgtcttctacttctcagtgtattacagactcacaatttaatggatgaaccaaaaaattaaaggctgtctatggtgttcccaattccttgagtcatctagtcttttaagtaagagtattatagaattttaaaagaaatacaccttagaaatcatgcagatttgctcccttcattctgcaaatgagaaattgtggcctcaagagacaaaattacccaataataatatttattgaacacctaccatatgttagtccttatcctttccatgcattatttcatttaattttgtcaagaaccttgtgatgaaggtattaactatttccattctacatacgacgatattggggctcaggaagcttgaataatttacccaagttcacacagccggttagggacagctgtgtctcagatgcgggtttcctggttcagattctagagttctttatctcaaagagagaacgagatctcgtatattcataatatataaatataagaatttaaattattttatgtataatcatcgttcatctaaaaaactcctgaagttttatttcgttgtataactgactatattttgtcttacatttataaagagagaatctgtggaacttgcattaaaacttttggatgaagatgaaattagaggctacaaattacatgttgaggtggcaaagtttcaactgaagggagaatatgatgcctcaaagaagaagaagaagtgcaaagactataagaagaagctgtctatgcaacaaaagtttgtaatttttttcccttttgaaaggttccatatattctagagtatatttttggtaatagccatctagttttattctgtcaagtgtgcctacacattattttaaaataatttcattagctcatcaggtacctttagcaatctatacaataggtttagatttagcagtggtggggattttaattttccagagtgtctatttgtaatataataagggcttaaatgagctaagagaagccatctgtttggaaaacgttgaacatcaaattaaataagatagtttaggcttatgtaccagaaccgtttacttctgtgtggattgaaatcagtggtaccaggagctaaatttttctatacaggtttgttataggaattagaaatgacaggatttt

SEQ ID NO: 139306 - DNA, 3051 bp, Homo sapiens
ggaagctaacactttagaaattgaacacctggctcaaggttgttcatttggtaactgacagagccaggatttaatcccagggcaatatgacttcagagtttacactcttaacaattatactgtcctgcttctcattagacagggatgtcagcagaaacatttccaaggacattgtgcttggttcttgctaggtaagattgaggtaaagaagcagctgactgcacgtgactggctgggataaaatggaagaaagacttcatacataaagtcttttacttcagagtatcagagagaacactactacttacctactttgtgaaatgtatgtgttttatttttaatcttatcattcattccttttttttctttcttatctttctagaggcacccagatggtgtggcctctgtgtcctttcgggatccagaggaagctgattattgtattcagactctcgatggaagatggtttggtggccgtcaaatcactgcccaggcatgggatgggactacagattatcaggtaaattttgctgcttgtcaagggcacacacattgtttcattaccaacaaatactgatccttcagatctaaattttgggtttggtttaacctatttaatgtaacaatgcttcttttatttttatttacttatatattttaattttttactcttcctcttaattatttacagtgctgcttttaaataatattttgcattcagaagatagagaaatgtttgagtctttcagtttctaagtctgaaagtttgaggcttgttcagaatagtgataagaaaagaacacattcaaccaaatgttactcttcctttgtatgctgtaaagtatagacagagctcaaatattaactttttaagagatgagacatttctgcagtactgtgatatttggcctttatttaagtggtcttatttaaggtcaactctagtaaatcaagatgtaaagttttgaaaactgaagatggaattgctttcatttcctaataagagatgctttataaaattaaggttgtttcatcaatattagatatgttcagagaagtaaccttttgcctgaaacttattttaatggcagtctccatttatccacaggtggaggaaacctcaagagaaagggaggaaaggctgagaggatgggaggctttcctcaatgctcctgaggccaacagaggccttaggcgttcagattctgtctctgcttccgaaagggcagggccttctagagcaaggcatttttcagagcaccccagcacatctaaaatgaatgctcaagaaactgcaactggaatggcgtttgaagaacctatagatgagaagaagtttgaaaagacagaagatgggggagaatttgaagaaggtgcttctgaaaacaatgctaaggaaagtagccccgaaaaagaggctgaagaaggctgccctgaaaaagaatctgaagagggctgccccaaaagagggtttgaaggcagctgctcccaaaaagagtctgaagaaggcaatcccgtaagaggatctgaagaggatagtcctaaaaaagagtctaaaaagaagacactcaaaaatgattgtgaagagaatggccttgcaaaggaatctgaagatgacctcaacaaggagtctgaagaggaggttggccccacaaaagagtccgaagaagatgactcagagaaagagtctgatgaagactgctctgaaaaacagtctgaagatggctccgaaagagaatttgaagaaaatggtctcgagaaagatttggacgaggaaggttctgaaaaggagcttcatgaaaatgttcttgacaaagagttagaagaaaatgactctgaaaactccgaatttgaagatgacggctctgaaaaagtgttagatgaggaaggctctgagagagagtttgacgaagattcagatgaaaaggaagaagaggaggatacatatgaaaaagtatttgatgatgagtctgatgagaaagaggatgaagaatatgcagatgaaaaggggcttgaagctgctgataaaaaggcggaagaaggtgatgcagatgaaaagctgtttgaagagtcagatgacaaggaagatgaagatgcagatggaaaggaagttgaagatgctgacgaaaagttgttcgaagatgatgattccaatgagaagttgtttgatgaggaggaagattccagtgagaagttgtttgacgattctgatgagagggggactttgggtggttttgggagtgttgaagaagggcccctatccactggcagcagctttattctcagtagcgatgatgatgacgatgatatttaatcccttaaacttgctttttagggagagtcctccatctacatttgcctgtgcttcagggtaattactagtagtgttacatgaacatgtgcatagtggtaggatgccatcagattaaagcattgaagtgtttcattgttacctgtacctaatggttttaaatatatgttaattgattgtttagttaaaatgtcatagttacaatgcaagtaaactggatacttgttcttttgtcagatttgttaaatgcatgcagaataatatttttaagagtattgattgaagtttgtgatattcatcaataaaaatgagttgataatatgcagaaactgaaaattggacttgagttaaattgcattttaaattcttgatattgctttatttatactgaaggttggcttttctgaggacttgaagaatctctttggagtctccttgcttcccgctggtattagcacgtatgtctccatttcctctctataaaccagaacatgttcctaaactcagaaaacaaccctctggattttttttttctgcccagtccttgcaaattaactcttgtttgttttctaccctctttccattaaaattgactctcagatgtgcaaaagtgaacttcctgcagtctacagctcccattattattaaaaatctaaagaaacagattagaattctaccttgtactgttagcgtctctgggcccctttagaagttaattcaaattagaggacctcttccca

SEQ ID NO: 139307 - DNA, 1453 bp, Homo sapiens
gaaattggtaagtggaggtagtcaggaagttcttgtggttcttcacatagattttacagctttggctttcattttgtttagctaaagtcatggggacaactcttcaatttagaacttaagttgaattataaaaatgatggatataagtggtagctgtatctagtgaagtgtctgtcagtaagtgaaacattttttggtggtggcttatccacaaacagtttagttgtagaataaaacttatgagtgacatctggaaagtaaccatgctaagatggcaagcacactggaaacaattaggccacttggctttcttttgctgtattgttttataagcctactttacctcccagtcttggaaacaagttttagttttttattggtttggagactagagccaatagtataatgttctcaaaggaaacagacttgagttgttggattagaggaactaacccaacttatatgattttttttttgtttttgtcgtgtagttatggcactgtcttatttggaacatttgcaactagggataatacaacatttttaactctcatttgacaacctactactaatcacagaccacaagggtaatgaccaaatttatgtggtttttgcactccatagttgtcttagcccaatctttctatactcttacgattacttgggttaacgcttctgtgaggaccttctggctcttgagataccctaaatatttaagatatttagatatcttgaagatagtataggatatagagattgtaccaaataggaatataaggagtatgttaaaatgaccagatacctgtttgatagtttactgacctagcagatgtgtggaaaaggaatcagatcttgattcttctgggtttatactggttgtaaaacagaatgatacagaaaatgttttccttgtttaactggtagttgaacatagaacttgggtattatagatcacttttcactttttggaatgttttgtattgaaacttaataaaactttaacatggcatctttttttgtggcaaggggctcttctttacttagaaattaggggtttatgtttttaaatgtttttcccatgtccccctcccccaaacactacctctgttgcattgatggcacttaatcagttttgcatgggaatgtccagagtcattgaggctgtttttgtgactaggcctcctttattgagagtgagcttcagggggaatgtagatgacttcattcagtcctcaccctaaaagttaaatggaagcacaatcacacacctaagaagcagaggctaaataaaccaggagtcaactgtagtgcttttatgtaattcctgcttacctcttggggaaaaacaggtcagcaacaactcagttgtggctgtggattccaaatactttgggtcaagcaatgcatgtgataatatgcttctgaatttgcagttttcagtttctctgcttta

SEQ ID NO: 139308 - DNA, 1543 bp, Homo sapiens
ggctttattaatagagctgttgtttaccaatggcgatctggggcttgggagggggtatttttttcaaagtccatttttgatgaagacctttaaacatgcttcgtatgtttttaacatttttttcaaattagtcttttagtcaatataggaaatggcttaagtttggggtccccctttttacccctgtaagccattgcaaacttgacatttagttggatgcctgacttgtttttagttctatgaaactacactgtatggagaaaatctattgcaagtggtctttaaaaagcaaaacctgaggcagcatgacccaggtccagccatgaagttgaaaaagatgctcttgaatatagtaaacttgaagacctccaactaaaaatccttatactgcacttattccttcaaataagttttgttcgttcaacttatggatttaacgtggcagtgcaccattggaacagaatgacaatccataagccatgcaacttaacaatttaagccattccagtccatcccgagccagtgaatcttccaccacttaagacaaatagtagaacatgaaatatattaagctgcaagtctgaacttgccttttctttctggaaaagagggcagtaataggcaagttttaaaagaatttccttaagagagataactagttttcatttatttaacttttgcaggttggtgattttgctcattatggtcgtggagtgctgattgattcacagtagataaagctggcagtaagaaatgctaaggtaagtgttgaaagcaatggcctttgaaggtttaaatgttgtgtaactaccatttagtttagctgtgacattggcaagttattgtggtcctcacttcatctgtaaaagaaaacgctgcttggaattgatgaagttaagtgctttaatgtgtagtgcctgacacattcattgtgaatttagagtgaggttacatttccgtgagtctggctcattcatgagattattcttagctatttttgaacccataaagcttgcttatagctcttcatatgcaagcattctcaacaaggaagtacacacgtaagaagtttgctcagctgggcaccatggctcgtgcctttaatcccaggactttgggaggccaaggcgggcagaccatgaggtcaggagttcgagaccagtctggcaaacatggtgaaacctcatctgtactagaaaaaaaaaaaaaaaaaaaaacaccgggcgtggtggtgtgcgcctgtaatcccagctactggggaggctgaggcagaattgcttgaacccaggaggcagaggttgcagtgagccgagatcacgccattgcactccagcctgggcaacagcaagaccctgtctcaagaagaggaaaaaaaaaatttgctcagtgcattttgtaaaaggatatactttcgttgttactagttagtgcttgctcatttgcatagctacaatacaaattgactaaatgtggagttaatgatgcaactgtggctgcaagctccctgtttaacataattttattgacattgacataatgacga

SEQ ID NO: 139309 - DNA, 1110 bp, Homo sapiens
tgcttgcttaaattggcagccttatgtgttttcccccaacagtgaaaatacaatttaaaaattttattaacaagatcaaatatttaccattgcaatatgaaggcaagttctacagttcaaaattgcaacttatcactggaaagtggctgagtgtctactataaaataacaagctctctggaatatcctcttgaaatacacaccgtcttcagtcttttcaaacaaacattaaaatgaatccaattccatatctcagcagatgagcaaatccctgttatggccagcaatggcagagtttaaaacctcccacccagttgagaaagtaaacttttaatacaagaattctgtaaattcagatttaaaatgttgtatatatacaatttatagtgttgccatattacctgaccattgaccctgcaggtaactcacgtagtgctccacctacacgagggcccccgccatcttatggtggaagcagtcgctatgatgattacagcagctcacgtgacggatatggtggaagtcgagacagttactcaagcagccgaagtgatctctactcaagtggtcgtgatcgggttggcagacaagaaagagggcttcccccttctatggaaagggggtaccctcctccacgtgattcctacagcagttcaagccgcggagcaccaagaggtggtggccgtggaggaagccgatctgatagagggggaggcagaagcagatactagaaacaaacaaaactttggaccaaaatcccagttcaaagaaacaaaaagtggaaactattctatcataactacccaaggactactaaaaggaaaaattgtgttactttttttaaattccctgttaagttcccctccataatttttatgttcttgtgaggaaaaaagtaaaacatgtttaattttatttgactttcgcattgcttttcaacaagcaaatgttaaatgtgttaagacttgtactagtgttgtaactttccaagtaaaagtatcccctaaaggccacttcctatctgatttttcccagcaaatgaggcaggcaattctaagatcttccacaaaacatctagccatctaaaatggagagatgaatcattctacct

SEQ ID NO: 139310 - DNA, 1787 bp, Homo sapiens
ccgacctatttaaataaagctgagggggtcgagggaaaacaaatgagggggcccgtttggttgtatgcttctcgagaaagtttggctgccatctgcgggagttggtagcggaggtcggggctttgtaggctggagcggggcgaggagcgaccgcaccacggcgatacctgcattggtatggcgctggcgctaatgatgggcatgtggacttccatgcgggctgcgggcttcgtattcattggcggccccggagaagaagccctctgaatgttcccagccaatgttggtggtaaaagttagtcccctgaccagtgtcggtggttctgggttgaatccaagtgtcgccattttgtcttttacacgcggtttttaatgacgagttttaattaggttccgctgcagtcacggagtgtcgagtgttagtgtgtgcgtccgcgttccgttacttaatagcaaacgatgttgacgatttgtttttatctttttggccggatagtagaattttcggtagggcgggggccggtgaagaagaggggcggcataacttggcttaaacttcacatttctccttggatttagtagggaatcctaatgaggaaaagaggagtcgttggaagagggcttggtgttaaggtcctgtgtctagcctgtgaccttgggagtcttttaaaaccatcgttaggaagggtgtgatgagtaattgaatctttcaaaggcaagaggactggaactaaaagttgctttttcaaatgttaagcagctgttgcttaagaacagctaagggtgatcaagggtagtggtaaaagttaagttggcccttttaaccagttttatgtaaattgcagtgttactaaactacttagttcaaattgcttcctactgtggctgaggcttagctcgttatcgttttctttagttattaaggaacaatggttttagtggaaaatatgagaaatgtgcgaaagtaaaagtgtccaataaacttgaggaactttttgcagtgaggtaatactattccttttcaacagactcaccggcccaaaaaaaaaaaaacatggttgaagcagatcgcccaggaaagctcttcattggtgggcttaatacggaaacaaatgagaaagctcttgaagcagtatttggcaaatatggacgaatagtggaaggtgagttgtctggcagtacaggctgggctattataattaaaatataagctatgatgaatttgattgcattgatcgtctgacatgataatgtatttttgtcctctaagaagttctgagctttctgtttacacatttactttggttatttcatttgacctagggtaacactttatttttctgaaaactactttttagtactcttgatgaaagaccgtgaaaccaacaaatcaagaggatttgcttttgtcacctttgaaagcccagcagacgctaaggatgcagccagagacatgaatggaaaggtgagattgtctacacgatggatgataacctgttactagtgcataaaataacatgtagttgtccaagtctggtctaggacagcttttgagttttcgttgtttttcagtatatacctgtctgggatccactcatcctgtttgtgatcctgttccaaagagtattctgtaattgcagaaccaaatctagtagtgagttatatcttatgctcgtaacattctctcagttcagaataattatggcattacatggtacttttttttttttttttttgatagtctccctccgttgcctagcctggagtgcaatggtgcagtgcccact

SEQ ID NO: 139311 - DNA, 1031 bp, Homo sapiens
taaaataagaaggctgggcgcggtggctcatacctgtaatcccagcacttagggaggccgaggcgggtggatcacctgaggtcgggagttcgagaccaacctggccaacatggcgagacccccatttctactaaaaatacaaaaattagctgggtgtggctcatgtctgtaatcccagctactcagaaggctgaagcaggagaatcgcttgaacctgggaggtggaggctgcagtgagctgagatcgtgtcactgcactcctgcctgagtgacagagtgagactccatctcaaaacaaaaacaaaaatgaaaacaaaaaagaaaaaagaaaattaaaaaatgtcaaagtagatcatataattccatgaagttaaaagtaaagaaatggagaaagtacatgcagaatcgtttttccattggtttcaggatttataaccagcaaaaactcaactaacatttggtcatatgattttatattcctgttttaggaaaacaaaactgtcaagtgggcttctaggtgggattagattttggagtctgtgcctcatgctaatattcagtggtttaggtaagcacttcatgaagtaaaaagtaagtagttttgaggtagaaatgtaaatatatatatatttaaattaacatattttgttatcacagatgatcttgggttacatctttttccttctctgtgactgtagtttcctctctcctcttctcccttccactccccacatacacaatgaaaaaaagataaatgtgttttaaatatgttagtgtttatgctgaagggaaagagcaatccgaaatgtcatggagatactacgtctgcatggaatgaatattggggtggagagtcagtgagatatgactgtggaagttgacactgtgcaagagatgaaaaataaaatggaatggaaacttctgtttgtgggttcaaaaagttcaggcacagtagagagttaggaaaaatagtaaccagctggggtagaggaaggtaaggatgtcataaaaatctgggaagcggtgagaaa

SEQ ID NO: 139312 - DNA, 1052 bp, Homo sapiens
ggggatagtttttaagttttagatttagaaacagtaagtaagagctggtagataagtggtccttgggatctttgccctgaagctcatagagtaatagagttaaagactatggccttgatccattggctaagaagccagtcagccattagttcaacctgtgtctcctgaacttaggttgtcagttccatgctcccaaactaagtttgtgtgacagatcttatttacttatttctctttgagaaggtactcttaaagttttctaaaaataaccttaagaatagtgttgcttctattactttatttgtaatactcttttgtaacataactttaagttcacttaatatattgatgcattgtcattgatctaaatttaacgttagaaaactgatttacataatgataatttgaatgtctttcttttatatgtacgtgcatttttttcagtgctcaattaggaagttttgagatttaacttctctttttttctttcttaaattttctagtattgtgaattcctttgttgttattcttttcttatctggaacggtggctatcatattaaggattctccataaagatattatcagatataataagatgaattctcccataagtaaaaaatgcatatgttagattcaacaaatacttaagtgcctattctgcccagttttcatcaatgttatatttctacttagagtattgcaccttgaatacaacacattttttatgcctagtgattttgtatgttataccaaatcagaaagtacagagttgagtaaatttttttaaaagaacagggaggtttattagagagttgtttgtcatcaactttttggttatatccttttttatgtgtttctgaactctcaaaatatcattattaaagattttcattgattagaagtatgagataacaatatcaaacattgcaaaatactgtaatttaggttatactgtttatactgttttgactcttgtgaccacttgtgtattggtcaatttttaattgctataacattggtcaagttccttatgtaggttaaatcattttg

SEQ ID NO: 139313 - DNA, 1059 bp, Homo sapiens
atttcaaaaatcagcttttagggttatattttcctgagaccaattctcactttgatttttttttcattcctgagcttgaataaaaggaaacagaaggaaatttctttgggaaaaaaagaagtgctgtttttggagtgactactgaagtgggaaagggggagatattttgtgtaattttgatttagacagtgaaattaaggctaattcaacttatgaaaacttacttccacttaccttgaatggaaaatcagactttttcattaagaaaaagtgtcaagtacttagccaagcaaataacatttgcttatagcatcccttgcttgtagtactcccattagataatttacttgtgtgccgtttcatataatgtcttaataaggttgtgcttaatttcttataaagtcctatgtacttttgagactattattgttgctggttttctatttcatttttgtgcctttaggtctggcctgccttggttttccttctcctgccaatggaggagctttaatgacctgtgccattgtgttatgggtccttctgggaacccctgccagatatgtgtctgctataatgtataagagtaagcattacaactgttattattccaggaagttgttgcgtgaaatgtagaaattaaaaggctgtgaagtaaaaaataaaaaaaattgcatgggggaattttagccgacttatgaaaatttaattgtgccttgattactctaaagtatttgtaaagttgactaaatcaagttgctaaagtaactattcagttttttacttccttagcatttagaggtgctaagtggaagacaaatgccttgctgacagcactattatgtccggggttagtatctcacgttctcttttccctatgcaattatatgcttccttacacttcatcttggaaaaaaaaaaatcattgtatactataacaaaaagtaggaaggacatgaatgaccattgtgctttgtgtagtcgcagcattccctttctgttgtatctgcattctttttatttttttgtacatcttaagctttagtacaaagagatggcgat

SEQ ID NO: 139314 - DNA, 1050 bp, Homo sapiens
aacaaagagcattaccatctccaccacccaagcattgggtctcccattctccacctcccaaacaaagaagctcctcagtcaccaagagacgttcaccttcattatcatccaagcataggaaagggtcttccccaagccgctctacccacgaggcccgatcaccacaaccaaacaaatgacattcaccctcaccacggcctcgagctcctcagacctcaagtcctccacttgtttgaagagcagggtcgtcatcaccccaaagaaggcagtccctgtctccaaatactaggccctttaggggagtctccaggactctggaacctaaaaaaacaaaaaaggctgcttcaccaagcccacagtctataatgagggtctcatcatcctgatctgtctccaggtctccagagccagcagcttaaaagcccccagcacctccatcccccatccagtctcagtcaccatctacaaactggacaccagctgtaccagtcaaaaaggccaaaagcccaacaccaagagcatcaccgccaagaaagccagatcaagaaggaggtgggaaaaaaaagaagaaaaaggacaagaggggggtggttccaagatggccaaataagaacagctccagtctacagctcccagcgtgagcgacacagaagacgggtgatttctgcatttccaactgaggtaccaggttcctctcactgcggattgtcagacagtgggtgcaggatagtgggtgcagtgcaccgagtgtgagccgaagcagggcaaggcatcgcctcatccgggaagcacaaggggtcagggaatttcctttcctagccaagggaaggggggacaagtggcacctggaaaatcgggtcactcccaccctaatactgcacttttctgacagtcttagcaaacggcacaccaggaaattatatcccgcacctggctcggagggtcctacgtccatggagcctcactcattgctagcacagcagtctgagatcgaactgcaatgcggcagcaacgctgggggaggggtacccgccattactgaggcttgag

SEQ ID NO: 139315 - DNA, 1100 bp, Homo sapiens
tatagcatagtgtaacgagaaaaaacttgcacttaaaaaatcagacacacctgacttagaatcccagctcttcctcttttagtggtttgaccttgagcaaagtacttaatatccctaaaagacattaataaggaactctgtccccttccataactcctgtttttcggatgtctgggttgttcatctaattttcctataattttttgcctgttttcaatttttttaaatgctgctttctaagacagtttatcatctctatcttccaacccttttattgaggttttaattcctcttgtcatatttttaattcccaagaggctcttttgttttctcaatagactttaaaatttctgtttcttgttttatggtcgcaatatctcctctaatctttccgaggatgtcaatgatagattttctttttaaaagtttccttctaagcttcagggatcttccccaagagaacagacctccagtattctgctggtgttggggaagggaagttatttggccctgcagaatagggcaaggaatctgcaagtcagcttcctaggctgactttcaagcagtcctcctggttattacctctctttcatgcctacttgcaggggtacctggtactacaagttcctgagcccttttggaattctgtggtataagtggatttgcgtttcagctttccctactgatgacttgggatgcaggtttctcagttctggtgattcagttactatttgttcagctgctatatctagtttccaacatttgttgctagtatcttctctccctattctcctaccttgtgtgtttatgccattttataattcccttactgtaattttatcagggttttgaggaaggagcagagctaaacgtgtgagttaaattatctgccatctttaaccacaagtctcttaattctttttttgtttttttaaattattttattttacattcaggggtacacgtgcacatttgtttcatgggtattcttaactcttcatgtcttttatatccatctcttttcattttaaccatcaccacattatacagcttcttaccacttcctatctgggctcctttcctctatcatctcgtccctt

SEQ ID NO: 139316 - DNA, 1070 bp, Homo sapiens
gttgaagctacatgtaagcgatgattgtgctgctgcactccagcctgggtgacagggcaagctattatctcaaaaaaagttacgtttataacattttcctgaaagtatattgttttcttttgttgtacacatttttaaattaaaaatttaaaaatttaatggacatataatatttgtacatattcttggggtacatagtgatatttcaatgcatataatgtatagtgatcaaatcagggtaattaacatatccatcatctcaaaatttattatttctttgtgttgggaacattgaatatcctcctcctagctagctatttgagactatatgacatattattattaattgttgtcaccctacagcattatagaatgctagaacttacttttcttatctagctgtaattttgtggcctttaacaaatctctccctaccccttgtttcctaatgacttttttctcccttcagaattgtctttgctgatctctttattatgatgaaaattctctggatggaagggtcatcagctgccgtctcctttgctactctgctagatatccttacaatttggtttagaattttagtaccactaacattttttggtgcatattttggaaataaagaaaaggtaaactcttaaaatactgcttttggccactgagcgatgactgaaataatacctcagtgtatatattacacatgaaatacaaaaagtcccactggagaaaactacagagaataatcattttggaataaaagatactttaaaaaattaagtaaaggacagtaacactttcaaagacattaatgcatttcctacattatcaattgtttatactgccttttacctctgatgaaccaaattaaaaggacatattgtagaaaggctgacatcagccaactcaggaaactaatagggttatacagtgggataaggaagtcaagatgtagtccaaggaatggggctattcggtttacagatttgaagttagcctattccacatatcggagaaaggtataggataccaaaaagtctcaatgaggccacacagccaaaaaactcttcaag

SEQ ID NO: 139317 - DNA, 1053 bp, Homo sapiens
catttgaaagtatatttaatagaattatgtgtgctgtgctataaagacatatttggaaaaggtgaatgtcaacaggctttctaaggcaaaagtggtatttgaatctggttttctgttttatgatgtcgttgttggtatttatggcatttgcagccttcaatttctaaagagaatgtttttaaatatgtatggagaaaattatggtgatattgatgagtctcaagtgagaactaacttatatgaccagagaaacatgggtaagtagcagcactggttctgactagagaagatacggccaaactctgaaactgcataggtaagggactattttttggtacttaaaggataagtggagatttggaatacagagttgaatgtttaggggaaaaaaagaaaaaaaaaggtttagagaagtgtatgactgtctattgtatagatttggattgatctttctgtgtgtactgttaagttaaagtttatttaaacctcttatttttattttcaggtctcattagctgtactacatgtttggcttccttttcttagtctttataattcttgtgattacttgctcagaagttacagttttgctgtattattttcatttatgtgctgaggtaaagccataagaaactaatgcatttgctatacttgcattattggaattggaagtctgtgtttagaaaagaattgaaataaatgataactgcatgtttctacaacttgggatcagttttatattgtgttttcctattaacacattttgactttgatgtggctgtcaagttaaggctgctttgatggaaaatttaaatagaaagttatttctctttggctggttattgtaattgctgcatgatattcagttaacagaaaaatataagggactgatttaatatttatcaagttcaatgatatttccttttctttttttgagacagggtttcactctgtcgcccaggctggagtgcagtggtgcaatctcggcttattgcaatctctgcctcctgggttcaagcgattctcatgcctcagcctctctagtagctgtag

SEQ ID NO: 139318 - DNA, 1009 bp, Homo sapiens
ctgaggcatcaataggcatagcacaattctggccagtatgtagaagctgaactgaatgccttccagggctgaggcaatgttatgatagcctgcacacattaaaagtcccaatcccagagggcacatgtggtatccctggaaacaaagagttgacaattgttaggataccccaagcaggacatacattacatattttattaaatttcttataaaaggttctcttttattccttttaatccattattttatggagcttatcttgtgttcttgttataactgctaacccatttatggttaaaatttcatctgaaaagtcatttttttctacttctttttacaggattatcattggtggtggcgatttttaaccagaagctttatagctgtttatctttttacgtatgcagttcattacttctctgccaaacttcaaatcacagaaattgcgagctctattttgtactttgggtacatgatgatcattgtgttgattttcttccttttcataggtaactacagaattactcagtatatttcagactctcttaagagtcttggagatagccataatgtaataaacatcaattaacaattagtggaaggaaaagggaacaaagtcatcatgttcatttttatgcattgcagataaaagattgcaaagctgagggacctggggggaccttatgtacttagctacaagactgtcccttgtgaatgttttaaaacagggatatgttccaaagcacagaaagggttatgtgtaatcacctttgaacagcctccaagcataaaaaataacctacttgaataactttcaaattagtaaattagattaattaaatatgtcatcatataagcaattatatatgaaggacaagatgtatacttctcaggattattcgtttggggttgttacttggattcatatgtgatgggaacttctgtctagattgatgcttgaagcaggtggaaaaaaatggaatgttttataaaatgctccacttggaga

SEQ ID NO: 139319 - DNA, 1012 bp, Homo sapiens
aaaaaaaagtttaataaaattgttaaagtttaatgatacaaaactttgatttataaaactaatatatgctctggatatgcaaataaacaagattattaccccctttggctatgggtagtgataagggttatttacattttctaaattgaagcaagttataagaagtttttttgtatcagaaactaggcttggacctcttttattctttttgaaatggagaagttaagctactaattttgttttcttgctttggttagagacctgcagaattcaatcagatggattctcacacccgtttgcagatgactgcctctggccctgttgctcatcctgtttgctcagcaagagaacctgttggtttttatttgataaatgtacaaatcttgagagttgggagaatcagtagcccacctcaaaactgacatgctttgtgtttttgagaaagctactttcatttgctatgacgtctggctaacaaagatctttttcattttgtttcagagacagttggatttttttcctgtttctggttaattgctaaaatctacagtgtgctgaaggtggagtaaagtatttccccaaaggattccaagcacatctcccttgcccttgaatatctgtatatctatatgaacatcaattgagatatatatgtgtgtgcccctaattacataattttaagcatatatataaaaatgtaaaatctcattgtctggcctcagtttgtatgacacaaaatactgattgtatggaagaaaacagattgggaaacagatttattctatatcatattttcctgaaaagctaccttaaaaagatttaaattaaagcaattagagcaagggaggcacatttctttaaaaaattaaagttgagtaccatactggtttttcagatgaaattttcttttcctttttctccttcatattgctcagagcatctaattccatcagaactattgtcaaataaattttatgtaaaatgtgtatttttctaatgggagttgattata

SEQ ID NO: 139320 - DNA, 1043 bp, Homo sapiens
ttccagagctcccggcgatgattattggtatttcgagggcgcttgggtccacatctagcttgggtcttcaaagggcgaggtcaagtgtaaataaggtagtacctagactgggttccccggagccattccggaagacttgggcacaaggaacgtttgggaaagaattacgatgtgcctgctagcaccacctccaccgtctcttcgcggaagcagcctgcattcagtctggactcgagggtccctagctccaggagaaggaatgagcacaccttttttgctttggaaaggttaaagcaggaaaagcccagcgctggagcatctcaaggcaaggtgctgaagagaaagtgagtgagtgagtgagtgagtgagtgagtgagtgagtgaataagtactgctctagtacttatgcatgtctggcgctggtctgggatgtcctgaggtgctttgtgacaagaacccaatgataccctggggaaaacagtagcttcagctgttagtctatctaggcatggggaacagtggcccgtcctgtccccacctcaaaatgccccattcctacaaagttttagctgactctcaccctctgtgccaggctgagcttatgaggactccagtttggcctctccagcctaccacaaacacctctctctctctcacacacacacacacacacacacacacacacttcattcactcactcactcattctctcactttctcaaaagtcttgtggtcaatgcacaggcttttgtgtcaaacaattttaggagggttatgaatccctacttcttgccactaactagcttcctgacctgggacaaattacttaagagctctaaacctcagtttccatatcttcaaaagaaagtgaataatggtggctgtctttacagttttcaagtgaattaaattatatagagcaagcagcacaaaacagtagcaactcagtggtagttattaaaatgaataaagcaatttctggtaaagtggcttcctctgtaatgtgtcaaagcaagcagagtggctcaaagtggttaatgtgc

SEQ ID NO: 139321 - DNA, 1153 bp, Homo sapiens
tctcctggcacctggagccactgctagtgcagctgggggctaacacctagtcacccccagagcggtaaaggtattccatggcagcagaacctagcaggccacagctcgtcataagcctttcactcagatttgcctgaggaccactgcctaccacttgggtggggtggttcactgcattttctatatttcagggactccctttataattccaaactggattctgatagttctagttcaagtccctgcctgcctccttcaagttcagccctatttacttcagcctatgtctctgaagttcaagtatatatatctgtctgcacagccctgattgacaagtacaatgaaaatgtctcattcctgtctggtttgcatttcattacattgggtaacaatatgccttgtatttcagaggacaaaggcaaaaaaaaaagggggggggttaattaacaatatctgtttattctcgattgaattttaaaggtatttagggcttataaaatatgtgtcaaatgataggaccatagtgaaaattctgatgtggccaataaaatctggagctgtgtgattttacgctcaccaacctgcagacacacttggttggcaagtgtgtcagcatgtcctggagatcgatagttcagcttggcccctgatgccaattaagtgctttatcttagcataaaaataaagagaagttaaaaatgcattcttttcccagctttcttcccccttcattttttattgccacttgcagtttttcttttaaaaagatctgggactctgaagagagggtggggatttatgtaaagaaagtgtcatttaccaggaaaaaaggcgaataatggtgagtttcaaggacatgttgcaatgagaaacactttgtgctccactagggagagacaggggcaccaaattcagcgtcctggaataattcccttcctggattcaaagattcatttattgaaataaatcaggaagccttggcagaacggaaatccgcttgctgggtttaaagggcctttaaaatgttgcgagtgttagattgcaagtcttttctaaatacaaaacagaagaaaagaccgcagcgtttcccttgaacttaaagaaaattactaggtcaccgaatcaggataatttcatgtccaccacataaaat

SEQ ID NO: 139322 - DNA, 1052 bp, Homo sapiens
gcgaggagtgagtgattgactttatcagtccaaggacattactctggaggcgaagaggctgggactcgcgcggcgagcggcaagcggcgagtaacgagcctgcctactgcccgctgcccgcctgcccggccgctagccggctccgccacttggcgcagcccagcccggaggccggtacccagggagcctcctggccccgcggttctgtgcactcggggagaggaggggtgcccgggacaggattggcaaactccgccctccacttactattttgcttatttttctttgtgcgcgcctgttagtttgttaaaccagatctagtccgagtcttttctcctcccttctcctccctcctcctccccccgccaacaccccctccctgctctttcttcccctcctccctcctatccctctgcaggagactcttgcagtgacggaaagttgcagcccctggtagcgccttgggggtctccccgcagtgtccaaccgccgccacccctttccgactacggcacttcggagatctcctccttcgccggtaccctctctcacttcggccggatcgcctgtgcccagaacgtcccacccatgacgatgctcctggacggaggcccgcagttccctgggctgggagtgggcagcttcggcgcgccgcgccaccacgagatgcccaaccgtgagccggcaggcatggggctgaatcccttcggggactcaacccacgccgccgccgccgccgccgccgccgctgccttcaagctgagccctgccgcggcgcacgatctatcttcaggccagagctcggctttcacgccgcagggttcgggctacgccaacgccctgggccaccatcaccaccaccatcaccatcatcaccacaccagccaggtgcccagctacggtggcgctgcctctgccgccttcaactcaacgcgcgagtttctgttccgccagcgcagctccgggctcagtgaggcggcctcgggtggcgggcagcacgggctcttcgccggctcggcgagcagcctgcatgctccagctggcatccccga

SEQ ID NO: 139323 - DNA, 4792 bp, Homo sapiens
cagcggacttagagcgcgagggagagaggtggcggccagggaaaggggcgacgccccgcaacggccgctcgaaaaagaagcgctgtcagtgaccatccacccctagccctccccgtcccgtggcgcctttgccgagttctaacttcccgggcagactgctctgcggtctcaggaactaattgggaccttctcgcgcccaggaacaaactggcgccgcctctttttgtctccctttctgggttaccgtgaagggactccgaatgtgttgagagcatattgcttacaagcgacttagctctcggcacacattcgtggaaggcaaccatacaaatgctaatgaaaactaactttcggttacttccgcttttttttacacttgattggcacatctcctaattaaatgactgatacttttgtcaaactatttttatttggagttccaggttcaattcagtcctccgggaggaaagctaaagcagtttcgtggtttgttcagaacatcttgtaaaactgtctggagccccctggatcgatcgatctatctatctatctatctatctatctatctatctatctatctatatttttttcctcaaacattaactacgactacccaggctttttaatatcgggcttagccaaaccgctgcatttgaaagaggcaaataaaaaggtacaaagaggctgaacgggattgtcctgtccggggcccattgtcccgccgggctcggttacattgctgaggtggtggcggaacgtggccgcgcattgggagccctgggtcgggtagggtggaaacacaacttaggggaaacttcggaggagccaggggctttccctccttgcaagaacaaagacatggtcaggttttgggccggccccgccccacccccacccccaccccgaccaccactcccaaacccagcgggctcaacctacgctcttcatttctctccagggaaaatagatgcagcagcagcccccagtccgcgctccctttccgggaagaccgccgggagctcagtctcctgctgcttgcctctgagaaactccggcgctgaccgtattttaccccccttgggtttttgccttttgcaggtgagaaacctttcaaatgtgaatttgaaggctgtgacagacgctttgccaacagcagcgaccgtaagaagcacatgcatgtgcatacctcggacaagccctatatctgcaaagtgtgcgacaagtcctacacgcacccgagctccctgcgcaaacacatgaaggtaattacctctttattagcggtcggcggtttgtaaacactcggcccgacgccgggccgcggaacggaagcgcccgcgctgccaaccctctgtcttccacgttaaatccgatttgctccagcagtgacaccttgaacccattttggggaccgggcgggggtgggggtgagggggtgggcgggagtgagcaaagttgggagggggaggaagcggagggaacaatcggttgtttactgggaagctctagccgagctcgcctgggcttgcggggctgccgtggccgcctcttcccgactcagcccgcggtgggaaccgagagtagccgcgccgaacccgagggtgggtggttcattcgctctttggcttcggataaaacaatagggccgaggagtgcaatctgattcccacacatttgtctgcgacttcgcagcgctcagggcccctgtgccaccttctctgtacctgctttctcaagccgaaacgggcttggtgaaacctgggcccggagttagtattttataggacctcacagtgtactgcttacctcactccatccgcggagaaagcatttttgaagtggcatgaccaaaacggaatgctttattccttttccgtaacaccagtcttaggagcaaaactggtttttggcgaacatctccgggttttctagacatcggtaatacggattttttttaagcagcatttttcttttaagtgggtcactgggcggtcttgttgttacagtgctcgaattctgctcttgtttttgcttgcacattgccagttggaattatattcattataatatatacatgttaattttaggttcatgaatctcaagggtcagattcctcccctgctgccagttcaggctatgaatcttccactccacccgctatagcttctgcaaacagtaaagataccactaaaaccccttctgcagttcaaactagcaccagccacaaccctggacttcctcctaattttaacgaatggtacgtctgaggacaaacacaaaccctgttaattatagaatggaccaaatacatttttaaaagaaaactgagaccaatcagatggaaatggagttttaaggcaagaggccatatatagggctacatcttgttaattgcaattgtccaggaaggttttgggcaagatccaaaagtagccatgcccttttctcaggatagaaaatatgttttggcatttgaagcattttttacaaaatctttacactactttttcttccccttcctcttgctctctgcacaccccattcttaaactcctccaattcattttaacacttgtcctgtttcttgagaggaagttatagaaggcttgttggtggtggtgatgttaaactgatggaaattctttttcgccttagtggtgattgtttaaactctcacagtcttaaaccgtgccaaagtcctgttatgtcttgaacttttcctcaaagcattacacttgtgaatgtatttttgtctaatagggtcgaaactgttgttcagtattttttcaggctgaggatgtgatgttactctacacattgtgacgtttagtatacagttgccttttgtaataactttttttttgtaaatacatatccattgatgccatatttatcgtttgtaatttaattattgctacaagtgccgggaactgaacaatatttatggataaatgttttctaacaaattctgtacagcttttgattataactgctttagcattaaaaattgttttgaaagaagaacacaatttacaattttggaaccactgactcctttctcttgttttgtaacagccttcttctacaaagaggagatgtgagcaaattaaatcttgtttgttggtatttataactcactcagatcccttttttaattgttaaattatttttctattacagtataaattccttacagtgtcagtttccatctgggaagactctcctttctttatctctatctcagatggttgtttaactgcgagtttaaatgtgtttgtcctggattttcggcatgcaaatcaaatattactgatcaattcagttagtggccatgacatctcaatcttgtacttcaaagactgagaagctggatttaatcatccctgccctacatatataaacataaggtaacctactgaattttatgtcccttagttctttattaccttacataaaaatgaaaattgcggcaggatgcatgtctgtctgttctatctagagatcacccatatacctatatatgtttgtatctatgacttatctaatctgcctatcaatctatctagtagctatctatatattttcaaaagatagcttatgtctaaaacagtggtgatgagtaaggccagttgagcattgcttacttatggttaaagtgcttcttaaaagaaccatagtccatttacaattttggaaggcaaaggctgatttgtttgctgtatatagttcaattcataattatcgcaattatccataacatttatatagcggtgtaataactgcagcagttctgaaatgatgctatgggaaaaaaattgcaaaatatgtatttttaaagttcatgatttgtaggcaaagatgttaagagcattgtttccattaaaatcaataacaatgaaaaacggttgtttgctttgtgataaaatgttaacaatccatttaatcttcagtgaagcaactcatttggacaaacagttcttttacagtggttatatggaaaagaaattgattgctattttggggggctggagtgggtagagtattgagaccttttttattagggtgctgtttgttattgagagcccaatctctgcatgaataacagaaaggtggacataaggaattgtaaagtatttagaatgtattgaataggcttaagtacctcctttaaggggcaatgctctaggtttttggtggcagtcaatttggtattatatatgatcattttcaattctagaattttgtttattgttctttttgaagaaataaagtcttggcacatcttatttatgttataacatttttgtatttggtgcctgattttttttcatgttcaaataaatcaatctaaaattgaaatgcttacagaacttctgatgattaaaagaaactttgattctgtgaatgcggttgaagcagtctatttaagttatctactgatctttgtcaacagacaattagttattgacagtttctaattgcaaattgctttggaggctattttttgttagtggagaataatggggtcttttgcattttcttccaccaatatccaagcctgaatgccatgaacagagattgggatgactacacatgtgatgagcaggtaacctggtcagtctatcactcccaacccagacattccgatcttgaccttgacattgagggtgctggaccagattcctatttcaggctttttccttcacctcaaaccagagaccattttaaatgctcagcaagttctcagaaagtatatattcataagactggctctaagtgtgttccattgtgaa

SEQ ID NO: 139324 - DNA, 1118 bp, Homo sapiens
accaatattaggagaatataaaagttttgcccctgtacatgattacctctaatttgggtgtagcatggtatttctcaaaatcacgtcctccacccttgtcatctgtggtaaagaaaactccttattttgatagaaagcttttcacagatttcccccctataatctggctctgggagtgcacatttacactcttgaatattcagtaaacaaccttagagagtaagtaccccccccaaaaaaaaaaaaaaaaaaaaaaaccaaacaaaccaaaatcatcaatgctcaagcccgaggcatgggccaggctcttaggaatcaacttgttactttccctcttgcaccttgtaagatctttgttcaaagtccctttttcaaaatgagtgattttgcataagattcccactgttaggcaaaagggaggtggctatttccacgcaagacagaagtttggccttcatccagctttagaaggttaaagatcaggacagggtccacgctaagcaggccggtcgatctaaattactaaagttggacatgagtgagcaaagacctccgctcacaaagcatcccaggaaagttggagtgttcaggacttcctcgctcctcccccttctcccttctccccgcctgatgtctctgcctcttcgccctggctctctctcccccttcttaaaaaactccctaaaacagaggagcaaagtcgaagggcctcttaacatgtaagtttgtggaagaatcgccagcagcgtgcccatcgcctgaaaagagaggttatcttggcacctagactgctttcctctcacaggtttctgtccctcgagtcccaagcctccagtggatccttggccggggccggggcggaggcggcgaggccaggcgtttcggaagtcggggctccagctcagctgtcctcgggcccctcgtcggggctcccagggtccctgtccacacaccaagttcttgcaagtctctgtcgaggctcgggcggggggggaagggacctcatttcctagggtcaattctctcgcggtctctgcccgctgaccctttgacctccacctacagggcccttggcggccgtaagccggcggtcgcccgggctccgaggacgcttcgcg

SEQ ID NO: 139325 - DNA, 1047 bp, Homo sapiens
gagtgaagaaagggaatcaactggcatatctgttggtatttgtaaggcaatgcctttgtaaggcaccatcttctcttttctgaaccactctctccctgctctttttctattttgctctgaaaatctctctcttatctcagtttaaagctttggtctccaagtcagatgcaaagtaaaccaaccaaatctgcccagttacataataatgaaagagtgagggaaaagtatttcagcagtaatcaattatttttcagtcccaaaaagtatacccttgacttcatttttatatttttaacactaaccaattatttttttactatccaaaccaaaaactgtaccctcaactttgtgtttgtatttttgtcccatgtactctcaaaacatgcacatttcctgcaaacagcacgttaatttatatcaagccttttcgatcttgaggacaaagtacaataatgtttacataaataatgtttgcaaaaaagaattgtataaaaccagaaagaaaaccctatttttgtcttggcttctggcttttttagatcttaaaaaaaagagttaccatttcctgagaacttgttgagtgcattatttacttaaatgtcaagtttgctaaatccagctcatctaataaatgtagctcaacctgtaacatttttagttgtgtggttcctaattttaggctaattctgtaaatcttccaatttcttataccgcttttagtactgagttttgtgttttccagtatcagactttctactaaaggtgtcagaacaattttaatgaagcaaataatgaaataaatataataaatttgcaacaaattgcactaaatgtcatttaacaccaacctgatgttagaacacaggtatgacaaaccaagacctttctaatagctttagaacacatctttaaattcttacagattaagaatgcagttgaaaagccacctttccagtctgctgttatgaaatcttgtcgcttggattctggagaggattagggaggtagctgattgctaatattgcaaactggcccccttcttagtgg

SEQ ID NO: 139326 - DNA, 1038 bp, Homo sapiens
ggatttagtctaatggctacaactctagcccattattacatggatcattttagccacccattcttgcttatctgtaatttccttcatggatagtgagaaacctgactcccagcatctactgtccattaatgcagggttgtgtgtgggcgtttagggatttatctcaaagaagagagcctctgagtttgtaatatgagccttttctctgtttgttgtgcctcccccatcaagtgatcttgattctcaggaaaccttcctctacttctaccctaggaattgctcttgtctctgggttttaaacaacccatgaagttgaggtggaaaagaatgcctatttgcctatagctgtggttgtctgcttctgatgacagctgggcttgagtgctgcccagatattaccctgcatcttctgactggttctgttcctaattgttttctactgtgcagtggtgccaggatcaggaaaaaccttcccagaagatgttggtgagactgaaaagtctaactggaaagcttatttccagtcattcctctctctgtgatgggtaggtttagactcaaccccacctccaccctcagcaatgggatccatccactttctatgtctctagggatcccccacagttttcttgttgcattctgggatctcacaaacttccttccctcaacacatacacatttctagatcatctccagggttgacttcagaaggggccaacagcctgtgtaagttctccatcatgtcatgaactggaaggtcaactgccaactttaatttcattgctataagtggttattgtaaaagaaaagaaacctcagaaattgtttatgagaaactcctaagttacaaagtcagaaccagtgacctgcttgtttattgtgtttcattggcacatacttcaggttgtgctatgaatgactgactaatgcttacactgtgaggcatactctaataacaatacattgttctttattatccctaaaaatattgaatctacaaatctgtactttttaaagagattggatctcaccatattg

SEQ ID NO: 139327 - DNA, 1032 bp, Homo sapiens
agactggggtttgaatccagactgtaccataaactggctgggtgatttgggacaagtcattcaatttccttcagcctctctttccttatctataaaacgaagatagatgcatgtacttcataaggctgatttttttaaatttttattttcatttttatttatttatttattttgagatggagtctcactctgtcacccaggctggagtgcagtggcgtgatctctgctcaccgcaacctccacctcctgggttcaatcgattctcctgcctcagcctcccgagtagctgggattacaggcatgtgccaccacacctggctaattttgtatttttagtagagacgtcaccatgttggccaggctggtctcaaactcctgaactcaggtgatctgcctgccttggcctcccaaagtgctggaattacaggctctagccacgtgcctggaggctgattgtaaaattaattgcaatagcaaggagctagtacagtgccagaagcatagtaggtatatcataaatgtttgtctcatttatattaactctctggattaatgaaatttttttaaagcttccaatgtaatacactgctaataaaatgtagaagaaaatattggtttaccagaagtataatgtattagtcagggttctcttagaggacagaactaacaggatatatatatatatatatatatatatatatatatatatatatgtatatgtatatatatatttatgtatatgtgtatatatatatgtgtgtgtatatatatatatatctcatttcagaatggtgtgtgtactttaaattctatccttcctttagtatatttctgacacatgtgtctcatggtttggaacatatatatatgtatatatattctattctatatatatatatcctattttatatatatatataaaggggagtttattaagtattaactaacatgatcacaaggtcccacaataggctttctgcaagctgaggagtgaggagagccagtctgagtcccaaaactgaagaacttgga

SEQ ID NO: 139328 - DNA, 1049 bp, Homo sapiens
cggcaagccgtcaagatgatttggcagattcagaagagcctgataaattcctcatagcaagtatcaagggagaggtacctttgagttttcagccttatgttacagatgctctgaatggtgagcttccaaagaaacttttggagtatctaatatttctgagaaaagcattctggttcccattttacagcaacacagaggcagccttagcaactaatggattttacatctggaaaaggagaaaagaacaaaatatttggccaatgactaaaatatttccacatcatctagccttcaaaagatcacctatgagacacttcagttttagaactgtagaagttaaataaagtaagtaattaactcaaactctactactttgggaattcttttcaatattctgcctagcatagattacgccagggaaaatgtggagttgaatcaggtggctcacataggcttgccactggatctgcttttagaaagagagagagggaattaatttaattttagaaaggtctctcagggctccagaaacagtggagtagaatggtctagcacttttgttcttttctaaaggattttaatgtattttctcttctgagatccaaagggccctgaaatgcctttcttgatcaccctttaaatctttgtgctgcttttttcttctaggctcccagagaatgaagatcacaatagagtaagcatggaacacgacgatttatattgatgactctctctctctctctctatctatctatctgtgtgtgtgtgtgtgtgtgttaaggagcaaaactgtattgaaataatttatgtgcaattttctaaccactgggattcagttgcactaccaatcctcattcaatgtggattggagaatagtgtgaccgttccttctcagggtattattcattttcccttcaacaatttttggctatgaagtaggagggtcccagatggattaccatctggggaccagcccaagaagcagaaagatagtcgggaagacatttttgacattaacaatgtccctgtggaggctcttaacctgtgac

SEQ ID NO: 139329 - DNA, 1046 bp, Homo sapiens
tgatgacttctattttgtcaatgagttaagtagcaaggttacagctgaggggggtaggatgtaggaataggcatgaaatagtcgtcttgaaaagtaagaaggagatatttctaaagtgatacggtagggtttctgggcaatgtttgaggggtcattagaggtcttagatcaggaattttgaagaaaacttgttgcccagagtaggggggattctctgtcctaagatacttttagttatttttctgtccattgctctcaaaggaactttttgttttaaacctaaggcctggtgtccttgaagctacttcaggtgatccaaaaatcccctgaacttacatgcaaaaaattatgcatatgtgtattttccagagaatgggtccttagctctcattagattatcaaagaagtgtctgacccccaaaagtttaagaaccactgttgaaatgcttgccctcctaattagtacagccctttaggactgcaccacagtcgctctccttcctagccagtattctcactggcccgtgaattacctaatatggaggcgtgttaggtaactcagcaactaaacccctagtatgaacttcaggtaaccctacctaatgtggtcttttcacaccaccaactctgcctctcttacccccagccattcaccacaatgactacagagagaggagacagtgtcattgcttaacaatgcaacgaacactgtcactacaagtaaggctattcctgcctttatttaatacccctcttattagtacacattgatgctgtttctcatccttggatatgctagttcaaagagggtgtgcatataaagaaatttccggccgggcgcggtggcacacgcctgtaatcccagcactttaggaggccgaggcgggcggatcacgaggtcgggagatcgagaccatcctggctaacaccgtgaaaccccgtctctactaaaaatacaaaaaattagccgtgcgtggtggtgggcgcctgtagtcccagctactcgggaggctgaggcaggagaatggcgtgaacccgggaggcgg

SEQ ID NO: 139330 - DNA, 1034 bp, Homo sapiens
gaaggacctccttttgacaagccaacctatgaagaatggctggctaacaagtacttgcttgtttagccatcagtttaagaagggtggaatagttggaggtttagctcttttggaggtttacagccctttttagaggctgtcccttgctattcctctctccttgcaaggttcagaaattcctgtcttttgggttcatatggctgaggccaatcaaatgctttcatcagcttgccattggatgttgagtgatatattgccaccagttaaaatttgacctactcaatgaccctcttgcaaacattaattgtgcagaacatccttctcctccaacaagagtatcttcttgaaaaggccactcatttacttaaggccagagttagcccaactcatccaaatttgttacaaagcttaccttgtactacttcatccagggattcctggagaaaagaatcacataggcctaacataaaggttagaaagagattattttcctcagcgactttgcaaacgattactaaaaagggctttctgaacttctatgagatacttatttaccataacaaaaacacagccctaatcatcagagaatagaaagatgtataactaaggctttactttagctgtgatggattttgcacaaaacctttgaattgccatgggaaaggaacggcaaattttaatgtgcagagaaatattaaaacagcataagcaatgatggccgtctggttttcaaactggttgatggataaagataggctctttttatttctgcagaaaccaaaccacattaaacaagtatttcttatcatggagccaattgtatgcaatattacagattttctttaaagcttctagttaatcttgttgtgtgcctttggaggtattaggaaggcattgtcctgagatgagtgaatatctaaaaggagactttttctttttaatcaaagtacagaagctgcaaaacaagggaaaattaagaattgtctttaaatttaactaagctaatccagctagctacagagatattctttcta

SEQ ID NO: 139331 - DNA, 1034 bp, Homo sapiens
aatggcatcagtaaagcgcaaaggcacacatggttctgtggtgaatgacactggaagatgacgctggaaggcatggtagtgactgaattgtggagaatttttaaatgttacatcaagttgtttgttgtttttactataggcaaggtgaaatcatcaaaatttcccaaggaagggaactttgctttaggaaagcaaacctgccagctgaagagaagaaaccagttaggatgttatgacagcagtccagtgaagaggtaataaggcgcaaagtagagcagtggcattgggaatggaaggtgaaggtcatggatcacggactagagggcacaggaatgaaatgaaaggccctctgaagtgttaagtgagcaactgccaggatggtggattccagttactaagacagggaacacaggaaaagtagaggaagtgtggccctgtgcttcaaatattattcttccctgttttctgtattgaaaagctcggctaaaatgataccctctctgtgaatccctccctagtccctcagtcagaattaagtctggctttttctgttttcatacagcacctcctgtaagcctccctttctttccttatggtagcacacattgtatctatgacatttgtgtacatgcttgatacctacaaatatatgataagctgtctgaagccacatattacttacctatgaatatttagcaccgatcaactacataatggatccttagaaaatgtgtattaaatgaatgtatgaatgctgctatcacacaagacattaaatgcagcccatttttgggacctgacttagaatatgcaatgatcccatctcaccattctggagtcagccatacattgtttatgtggctatttggtatcatttgccttgatcatatgcatttttcaccagatatattttcaaaatggtttgattctttatgaaaggaaaatccattctccaatgatgacttttttccgtacagtgatttaattcccaaagaatttcagcaacgttctatgtacttgtcctcatcactaaa

SEQ ID NO: 139332 - DNA, 1041 bp, Homo sapiens
taagcaggctgcagcatcataataaatgatacataatatctgcctttaaaatgcctgtagtggttaagagggagggctctgacattacatggatttgaaacacaattcaaatgcttataaggtttatgatttggggcaaaggaattattaatccatctgtcctttagtttcctcatctataaaatggaggtaatagtagtatagacctcatagggttcttaagaggattaaatggaatgataatacatgcacagcattttacagtgttaagttcattaagttaacaaatgcttcatattatttgccgttacagtccatataataacatgctgccttcaggccaatatatataagcctataattcttggaagactatggaaatcctatcatatattaaattgtcattttttttaagactaagaaaaatttatgtaaagtccaaaagtacagctgtttacaggggacgaactgatccacaaggccacagtctaccctcatcagttagtgtccatcactgaagtggaataactcaaaaggaaaaggtaactcaacgagccatccatttcccacatagattcacaacagaagacagaaaatatggagtggaatgttgaatcagctgctgttgggagaccctggtctgcactctatctgtattcttactgaagggagtgcagggcagggtttcccatacagagggcacagactaccaccgtatggcaaatgttgactggaactcaacttcaaagccatttcacctggaatcttaccccaccaccccaatgcttcatgaaaattcaactgatcctcttctatgaagaaactcaatcctgataagtctctttagtagttattgaaatgtctttgtaactctcttatagtcaggttcagtaagaatgttaagtttctaattgagcttttctttctgaacagttattttgtgtatgtttattttctgtttaccaatgtaatatatgttctttgcagaaaaattggaaaatacaaaaaggtatctacaaagtcccccaaccaagagaaaac

SEQ ID NO: 139333 - DNA, 1043 bp, Homo sapiens
ggggctgcaaggaggctgtcgcgctgttccggagggtgcctgcggcggctgaattcctgtgctgcgactgtgccgcgcccagagcagcagcaacagcgaagatgcgaggccattacctgtttgatccctgtcggaaacctggcacgggccaacttttcccgattatcacgccaagaagttgcaaggactagtcgaagactcggaggggccagggcgagggcgcgctcccccgcgcgctgcctcgtccctcctccgtccggccgcccgagctcccggcctctctcccgcccgcgctcactccctccgcccgcctccctcctctggcccccatcagaagggcaacagggcgagggggtccggcgaaattcggaccggagcagctggacatgcacggtgtccgccgggcgcaggggccgaccacacgcagtcgcgcagttcagcatccgcgtgccagtctcgcccgcgatcccgggcccggggctgtggcgtcgactccgacccaggcagccagcagcccgcgcgggagccggaccgccgccggaggagctcggacggcatgctgagccccctccttggctgaagcccgagtgcggagaagcccgggcaaacgcaggctaaggagaccaaagcggcgaagtcgcgagacagcggacaagcagcggaggagaaggaggaggaggcgaacccagagaggggcagcaaaagaagcggtggtggtgggcgtcgtggccatggcggcggctatcgccagctcgctcatccgtcagaagaggcaagcccgcgagcgcgagaaatccaacgcctgcaagtgtgtcagcagccccagcaaaggcaagaccagctgcgacaaaaacaagttaaatgtcttttcccgggtcaaactcttcggctccaagaagaggcgcagaagaagaccaggtcggaaagggcttttgctttcttttccccatactttacgagtgaggtgggggcggtggggagcaggtatgtagcataggtgagtttgttggtggcccatcttgtgcagaagaggccacctagcc

SEQ ID NO: 139334 - DNA, 1101 bp, Homo sapiens
acaacaagatacttgaagaacacagtatacaaggagtcggcataatgagaatttccccagttgtatttttcttgtaatattgacgttgtttttccccctgttgtgaactaaagagatagaaaatacctttgtgtctagttgaaaatggattcttaattaactgtccagagatttgttgttagaggtaaaattctgggaagggttctttgtatggacaggaagaattagctctgtagcaagcataaaaagggcccatttcttcctaatggcttttccaaggaagtggggaaggagagaaaaaccgaaaaggacattctcttattgctcaaatgaccagatttcttggacccagaactgtagctcatacacagctaacctagggtcaaggtttgtaggctgcctctaaggcatccctttctttgccaaattgttatgcagatgtgatgtgttaaaaacacactccagccctggttgtttggagggcatctttcctaatggaggtgatacaatgtgcttattgagtcagcaggcactttgttccagagtagacagtaatgcaggagtaggaacataagatatggaggctaagttctgtcatttattatgtatatgacctggggcaaatggttcaccctcagcctctgtttgcttacctaagacatggggagaataataataccaacttccaaggcttgttgtatggatcaaatgagataatccatggaaaacccatctccccatgcgagacatatccttacatagtggctcaataaaagatagatgagcacgacagcattttgtaggacaaggaaaggctgggactatagactctgtttatttgaaaataatgccaatgagaggtctttttctcttgggccagtaagtctcactcagggaagaattctgacacaagtacatagactgcacatttaagctctatctggtgctcttccagattatggccttggttttgaggaactccaggaataaggggacttgatcatagacacactagtggagagggagcatcaggtgcctgtagatcagcagaaatgctacttttttttcagaggaatgagatgccatacatacaacctaatc

SEQ ID NO: 139335 - DNA, 1035 bp, Homo sapiens
aggacctctacttgcaaatatttctttttgtgatatgtggatgatgacatatcaaccatccaagatggtgctggatttgaacctttttctaatagcagtgggaagtcattaaaggattttaagcctagggtaacatgattcaattttcagttacatgcgatatgtggatgatgacaaccaccaccaccacaatgaaagtaagaaaaaactgatcagtgctttttctgttcttttcttatgttattgcatttaattctcacaacaacttttgagacaggcattaattttactcttctacagatgaggaggaaaccaaggctccaagaaataacaccacttgccaaagtcatatggcttgaaagtgaccaagccaggaattgaattcaggcaggctggtggcctttcttaaccattacattgtacccagaaattgaaaaccactttttcccccaaactgttaagaattagagagatttggtactctgccagtactacttactggcagattttgaaaagccgtgtacttaattaaagttttcctgaagagagtactttgctattctctgaaagtttacaccttccctatttttattgtctgtgatgatgccatttatgtttttatgtggtggtatttttatctttttctttctgttagctgtcatttttacctatagaacctgtggccaattatctgtgccattttctcacttgacaactaaaatattgacaataaacatcagtcattgcttgcagcttagaaaaaaatgcagtgagacacatttatcataactgagttttggaaactagctgtctttatattcaggtgacagacacacttgtaaacaactgatgtttacagcaccaacttagatctcacaggaggaatggggtttttttcacttgcctatgtattcttcaggcagaatgtgtaccttaagtgtttgagcccggcaatgtcttcagtctgcctgagctccaaggttctctttttcggcttcttaggctaatcagtgtgtgggtcctagggcacacaaa

SEQ ID NO: 139336 - DNA, 1343 bp, Homo sapiens
aaacatataaaagagcaacacaatgtattccatacacccttcttccctgccaaaacaagaagctggaatgacctgctcttttggcttcacttggtcaagttgtaaactgagcaataatgggtgctgcttcccttgtagagacctgtgtcggagatggctctcctatattgatgaagctactatgtcaaatggcaagtagctctttcctgcctgcttctcagctcatttggaaaaatactgcgcaaaagacattgagctcaaatgatgcagatgttgttttcaggttaatggacacgcaaagaaaccacagcacatacttcttttctttcatttaataaagcttttaattatggtacgctgtctttttaaaatcatgtatttaatgtgtcagatattgtgcttgaaagattctcatctcagaatacttttggacttgaaaattatttcttctctactttgtaaccaaatgcaatcggtgtgccttggattatttagtttattaatgaattaagtcaaaattacggctgcaaaatggctaaggtcaagtaaagcacaacattatgatttaatatgcttttgttgaaaccacagcttttgtgcccattgttttaacttgtgtgaaacaatacaaagcccagaaattcttttcggggcatgagtaaattttgttcagggctactgtctgtatgtgcccagataaaattttcatgagagtagtttacaaaagccgtatttaaaagttaatattttcacactttttttctggatttctgcttataattaatgtaacttaaattagttgtgctctgctattttctgtatatttcatgttgtaattctttttttcaaataaaaattaattcttcaggttagataaacttgttctgcctttttcgttccccatcacatactgcttcatgtctgtctgttcctgcaaagctgctgcagctaccacatttaccagtgaagaaaagagttaattcttcatgttgcagagcaggcagttatgcaagtggttttgcaatcaagtttgtaatataattttttaaaacaactttacagtctccaagcaaatatagatccctagcagactgcaggaagagaggctcagaagacctcctgattagaaatggagatgtcattcagcttctccatgggaatgctgagggtcaatggtaggtgtgtttgcaaagcctgtgatgatctccagctggggcacatagatagctaatcaaatgttctgctttatctgtatctttgttatacagtctccaaaagcagaaatatcacagcgatggctttcattttcattgcttcagcactgcctataaagctcactgaaa

SEQ ID NO: 139337 - DNA, 1630 bp, Homo sapiens
aggctctcatgtcttgcatatgcaggacactctgatgggcactagagagtattggttgtcaaagtgtggtccctggaccactagaatcaacatcacctggaaacttttacagaagacaaattctcttgctctattcagaccttctggatcagaaactctgggaacaaggcccagccacttgagttttaacaggctctctctgtgattttgatgcatggtcaagtttgggaacccctgctataaaggatatagtgatgaataaaacatatatactggcttcaaggaatgcgcatttcacttaccgttggtttaatgaatagagaagagtcattaacagccgaaatatttattcttcctctgtgaatggttttatttgaagtgattttaaatactttatttaattcaacaaatattgacatagcatgatctgcattccaggagttatgcaaagtgctaggcatatagtctaactaggatacactcagctgccatcctcatgaagctaggagaatagaaagatagttaaacaagcaattaaaagtaaatttggcgagtgttacagcagggaagtacgaagtgctgtagaagcatacatgaggatcacctaaacaactctaggatcaacagcatagacttctttggagaaatgcctaacagagtgcctgatactcaacactttaatatgatgatccttaatatggaagagttctctactggttgaggagaaaaaggtaatgatagccttgtagagtttccatttatccaattaaaggtcacttccctcaggtcatctatgctgtggcccccaaagaagtaaggagagagcatagtactaatgccttcatttgacaggtgaggaaaccaagttagaaaaagatgacaatgacttttcccaggttgcatgaatagtttaatgtggccaggatgagatctgttaatttgctgcttacattagattggttaatccatttttttaaattcaactttttaaaggattacagctagttttacttctcaccttgtggtaaattagcaccatgaagtaactgccacattccacacttttcttatagtttggactgaggcatcacaatctgcagaaatctctgaagaacctgcggaatggtcaagcaactatttctaccctacttatgatgaaaatgaagaagaaaataggcccctcatggttagtaataatatagtaaattaaaattattgaggcagttttactgatgaaatataggtggagcacataggggcaatcttttgtcagcatccttgaggccattaggagtaagccattgctaaaatagttgaaataaatcttattatgaacatcaggaagcacttctgtctttaagtagaacctgtttgacctatacatagagcttctgctgatgttgatgaaatagatagtcaatctttccaaatctctaaaatcccagttttatctttagtagagcttcaccactgtgttttccatccaggcatgtgaaataaaatcagagaacaaaggggcttcaaatacactttaaaaaccagtttggattccagattagaaaataaaggaaataagcattatacattaaaaacgatttaataacatctgggggatatattttagtgtgtt

SEQ ID NO: 139338 - DNA, 1092 bp, Homo sapiens
cacctccctcccgctttttttttaatctttaggcttctaatgtagatgtgaagatgacgtggctaaaagaaataagaaatattttgttgaagcagcaggaacttttgacaggtaaattcaagcctgcattcttcagaacaagaagtatagtaacagcttattgactcagatttttaaattatttttccagagaatggggctgatatttactttatactattacaatgagaagatttgttaatttaattagtaggagattgagattcagaggattgtttaaactattttgaagaatgaactttacactagaaaatgaacccttgtgcttaagaagcagttgagaagcaacacagtgaactgattgtggtaatccccagtcctttccatgaggtgactctgcttaatatctcgagtaatcattgctctataatgatggaatgggagccagttctacttctaaacttgaacttcttgaataaaatattatatggtccagacctttccaaattcaaacttgagactggccttccctctgattatttcaagtctgtgaagcttaagtctaatggcaaggatgcgtgtgtgtgtgtgtgtgtgtgtgtgagagagagaaagtcattggccttcaaggaagtaagaagtgtgacttctgaatgataatatgctttgttttatttctcagttaaaaaaagaaagcaacaggatcaattaacagaacgggataagtttcagatttctcttcagcagaatgatgagtaagtgattattctttaagaaataccactcctgcaatcttttgttttctgtatgtaacatgaagcaatgtaattaaagtatctctgacaagaaccatccaccaatttagcaataactcatcaaattccataaacatcattttctgaggtccagccttatactggaggctgatagttcttaatagttatcccttgggttgatttctaaacatgattgaaaatgctttatttttaatatatcattggaagaattacatgtaggctgacaggaaaggaggctgtgctcataagctttttttttcaaagtatttttggtcacctttgatctgactggaaa

SEQ ID NO: 139339 - DNA, 1869 bp, Homo sapiens
aataggtgttctttctattttatagttgaggaaactgaagtttagaaaagttaagcaacttgcaccaagacacatagctagtgaatggtagagatgtattccaatccagacctctctaacttcaaagcctgtgggccttccagcttatcatgttattaagacaaaaccatgtaatgaaacaaaattaatttttaaaaatattgaatatgagattactattcatcttaaattgtgatatttgagcagaagtaggttagttggaatgatggagtgagaatataaagatagtttgggacattgtgaaaataacttcttactacgttcagggtggatgttacaggttctttcattaatatgttatgttaaattacatttctaagcataagtgcttttcttctccttggtatggcgatctccctagcactatctttaatgcttattagctctaataagggccatttggggggctcataactagaacagagagtgagatactcctttagataattaggttaagaattgaaagaaaagaggaaggcagaaaggaactaaaagaatgtttgtgcaaaggagtgagattgcccaaaatgcaattagccaagctgttagcagaaaatgatgaaagaaaatggaagagtttatgacttgcacaatcacgctgaggaaaagaaaaaattgtggtaaggaataaggaagagatattgtgtacagaagtttcactgggtacaaaaagacaacaatgtcccattacatattattattattattttttttttagaaaggccaagggattggtggaaaatagagagatccttgtgtacctggctggttctctcctgtcccatgaattagatgtttataacttgtaggacttctatcaaaataaattataatttgtaggattaagtggtctgtcaaatgattattctaaataactatttaaattaattttcagtggcttttctttattgatgtttaatgacttctgtgtttgactcaataatttgttttaatagtgtactattaatttataacataattagatcttagatgggctacttggatgttcagatttataacatttgtgtcaaccactgaaatgaagcgtgcaatctgaactataaagtgcatagttcaatgaaaacatttaaatactctcgtctatgattgtaattactatttcatattcatttaatataacatgtatttttctgcccaagagaaattctgtttcacttagaatatgatagggtagatttaatgtaatttcatattcaaaataaaatgctcatgaaaattttgacttatttattatagatggatgaagttggaatcactgaatatgtaaaaggtgataaccgcaagtttgaaatctggtatggtgaaaaggaagaagtttatattgtccaggttggtcatttgaaaattcttctagaaacccaaacctgcattgaaatacaaaagcccgaatttataaacaaaaataattttggtcgcatttcaaaatttccacccctttcatgtaggtcagttaaatattatttgaatattctttgtgatgtatttaaatgttttctagtagttacattgagatatgcctgtggtgttctctagggcttcaagttttcacaactacataagagacttatcaactagagctgacagcttggcaggtacttctctgtccccatcaaatttccaagttatggaattataatagttctgagttcctcttatgctaagcattctaggggtacctgattatgagacatggggatgtgacagttcagacttgctttctgcttctaaagaacatggttaaagccctggccagttgtatagggtccaacatgtttcagggaagggaag

SEQ ID NO: 139340 - DNA, 2440 bp, Homo sapiens
cagtttccaaattttgcggaagttttccccttgcttatcttcttcataactttgtgattttgcctagtaaaataacttttccatcattttagttggttgtcatgagtgaggagatctaaacgcatgtatcaagttggtgcaaaagttactgtggtttttgccactgaaagtaatggcaaaaaccacaatcacttttgcaccaacctaatagcagtcccccatctttaagtctcatttgaattagattgtatgttggattttacccatattcagaggagagccatggttcttattcaggcgtatttttccccaatccctttgtgttctatactttctctatgcacatttcatcctaaatatctgcatcttgccctaactatgggcccctacaatgttcccggaacccaacatcatgacccttatatttatagtggcaatgggccaattactgaagtatagcaccagttgatgatggctttttcttgttatattaaaaattttgttctcatatccagtctgatttatattcagcacaaccaatttcttttctgagccttggcttgtagagcttggtctttcgtgaattttcttgaatatattaaagaacgttttaatcatgttaatctatagtcattccctgctttcacaccttttaagcattccacatcaatatgaatttatatttgaaaacttttaaatctttgaaatgttgaaattgtttacctctccaatccttgaaatagtgtttatggtagtttttcagatatattgtgtcttataatttctgtactataacagtgatttttccaataaatattctttgagatgtaagaaacattggggcattaggtttaatcaatgaacacttggcattttcacaggtacatgtcttaatttaattttattgatatttatcttttaatgacaggaatgtcaaagaaagttaaaacacagacttagactggattcctatttactcaaaccagtgcaacgaatcactaaatatcagttattgttgaaggtaattatatgaagcatttgtttgtttctttactttttgagtcagatatgacagagccattaaaaaggaaatagtttactaggaagcactagaaataggtaggctcaatgactgggaaggctggatttggcagaattttgcagtgtgctccatcaattcactgtggctacaaatgccataggcatagatatcaggctgagaatatctgggatcttagctatttaatttttcatacaagttgtgttgatttccgcacaatgttttactgaagaactttaaatattagtaagaagaactaaacaaagcaaatatttcttatagttttgaggctgcatttcataggggccttcctaatgaaaaatgcgaatggcactcccctagtataatgcgaaaggattgctagaatcttgtgttaagtataaatacaatatggcttgttttaaagtgaattttcataatattctatgctatatgcattatgagtgcatcatggctaaaacaaattactgtatgtagaggacaaaagaaccctacatgtaatggctttaaaaattgatctctgatgtgtcttaatagctattatacttcaactccagaagcattaaatgtcctttgttttatactattcagtcactattctacttcctctattttgacagccattaaaaatattactgcagcaaagggcatgtaaaaggaattactccaaaatgtgacattatatttggattccagcttgaaagcatgttagccaaaaacttattcatttcaaccagatattaatatctgcctaatattaattcctgatttctaattacaggagctattaaaatatagcaaagactgtgaaggatctgctctgttgaagaaggcactcgatgcaatgctggatttactgaagtcagttaatgattctatgcatcagattgcaataaatggctatattgtaagcacattttaataattgttggaattttagagggtcggcatctcaacatcccttttcccctcctggaaccaattgagaaataacgtataagaatcagataactggagatcaaaatgttgatgttactactgataatgctaagtggagaattggcttcagatcagcagccaaatggatttatgagatcccccttgtccccaacagtcttcccccaatcccagacctgggagatcctgcttaaggaatgtttgagtcagctaagaaaacgtattgctccataattgctgcttgcccctgtagataggaatagataggaaagaaaagaatcaaatctttagcacttgtgtagccttttaacaggttagctccacccagtgggaaaacttgaactggtatatatcatgcaccaatcaggattgaagaagagatggggagacttaccctagctgaaatacctccagatgatatga

SEQ ID NO: 139341 - DNA, 1034 bp, Homo sapiens
tttctagatacttatcgttattctaccccaacctctcccagatgtgggagttacaaaaatctcttcttattacatttaaacacattctattttctctgaatttcatattcttaaagaaatatctcctggggttttctgtcttgcttgtctagactcactaggcttgttgcgcagctgtcatctggggatcttggtgaacataatttttggaattctcctcacctgtctattgcataggctctcctcattcctaggtgccatgtctttatttttcttgtttacctcccttgtttggtggaacacatcctccagtagttttcccaagaaagtgtacacagtacataaaagtttttgagagtgtatgtgtctgcaaatatctttattctaccctaagacttcattgctagtttggctgtgtatagaattctaggtaagaaataattatactcagaattttgaaggtattgcttgattgtcttctagcttccagtgttgctattcagaaatctgatgccattttaattgttgttcctttgtaggtgacttagtttctgtcctctgaaagcttatgaaaacttattttcagtgttcaaatgttggcactatttttatccattatgctagtattagggtgataactttgaatttggaacctcctgtacaaatttacttggaggttttctttgatttcctccacccaattgtctccattttctctttttggaatttctgttgtacggatattggatatcctggactggtcctctaattatcttatcttttctattttccattctttgtcttattactctactttctagttcttccattgaggtttccatttctgccattgtgtttttaattttgaagagccctcatccttttactgttttttcaatgtttcttttaatagaattctattttcattttatgaattcagtatcttcattcatctatacaaagatgataatagatttttcttttaaaaatggctttcttctccctgcacatcttctgttgtcttcactttgctt

SEQ ID NO: 139342 - DNA, 1083 bp, Homo sapiens
ttttatatttactgtgcttgtgcacctttacatatatacgtgaattttctcccaaacttaatggacagcccttagaacgagagtccatatcctatatattgttgtatctctcattgggttagcagcgttcttagcaaccagttgtggtttaataaatgtttattgatgaattgtttatttattcaacaaccatttactggtcacctactatgcaccaagcattgtgccagataatgtggataccaagcccaaatctatttagatataaaaacagggaaattattaattgtgtagaagatgagttgcattagatttgaaatatacaaatggtcctgggaaaatccagaagaggggcgtcttgcatagaatgggggtataaacaatggttgtatagaagagataactcatgagataaatgttaaataatgagtaggaggtagcccattcatgagggtcagagaaagaggattccagggaaagagaattgcataagtgcctaaatggattatgctacagtgataaagtcccagtgatgaacctaggactgtaggctctaacttggaagtcagctacaagttcattcactagggaatcaagagactaataacagaatatatttcttggcagcctattagttcatcgttatgcaaaaagtaggtttttatagttcagacagagaagcctccatctaagcctcaagcttggcaagtggaagctctgatattacttagataattatgtgtcctcccaccagatgcaatgggcatgctgttcttggaatataaaaaaggcttttgaccagctgctagtacagtaggccctttaggccacatttcctaggatgcttggttacactcttgtttagcctttcttgatggcaaaagtcatattcacaaattagtaatacatttgaatttgttttttatcacagaaggatgattttcagatgtatgcaaaatattgtcagaataagcccagatcagaaacaatttggaggaagtattcagaatgcgcatttttccaggtacagtaattattcaagtattggatatattctttctggaagatattgcggtatttctt

SEQ ID NO: 139343 - DNA, 1685 bp, Homo sapiens
ctatgcattagctatttttaccttctcatgatgataatacttgaaacattgcaatatagatctcagtaataaaataactgataaatatggtcttttcattttagccacgtactaaatgaactgatacagactgagagagtttatgttcgagaactgtatactgttttgttggtaagcgactcaaattgtatttgccctatcttttcccgaatgatcccttgctacattcattagaaagtgtttaggggcaatcttctacttccgtctccttccttggttgtcatatggcagcagtgggcatttcttttattgtttgatgcagcatgtcggttaaacgtgcacattcaggctctccctcagtaatgggaatgattgattcagaatttattacagaagagaaaatgttctcttagggatacagccgattgttacaattattcccagggtgctatttagagatcgtgatgtaaaaaactgagaatgggataaaatattcttttgacaaaaatgtcatgatattaatttggtctgaaaaaacctaagcacgtattgccaatttaaggagaagctgatgacctgtagtctatgtttttatcttggtttctatcttgtttcctacactacaagctactctgaaggccaaagagctattactttattctgcctatttgattggaaaacttgacttcctttccttgccctgccttctaaaaaaaaaaaaaaaaaagtcatggataactttgggaagtaggagatttgaattgaattaaaattgaaataaaattcaaaaaacttcaccatcaaatcccttaatattctgctgtacctacaccattagtagcccaaccaaatgtgcatgtaattattttaaaatgcatgaatgtatttattttgggtagggttatagagcggagatggataatccagagatgtttgatcttatgccacctctcctgagaaataaaaaggacattctctttggaaacatggcagaaatatatgaattccataacgagtatgtaattgctgaattgaatatttattttttataaaactatttaaagtgctctctttaccagtttattatatttcacataaaatcatgcaattttttttctctgaaattttcacagcattttcttgagcagcctggaaaattgtgctcatgctccagaaagagtgggaccttgtttcctggaaagggttagttaaattattttttaaatatatataaatatgcaccaccaaaatagcaactcacttataagaacagatttggagacaagataggtactttatgtctttatgtttttggagaggacacattactccagcaagtatttaataccaaaccaagttttgctgcagaaatggatgcactgggatatccagagcataaaaataccccttccattctgtggtatcaaatgcttcagtggctcagctcttgaacactgactcctgggtaatcctagtaatccagggaccatcctgactatgaagatgtaagagttgggatcatgataacaaaaccatctggggcttggttaatttttttttttttgcctaaaaaacaccttattatttatattatttgtcttattaaaatacatgtaaagttttagaattggatctagtctgactttcagccatcaaggcatctatcacaggaacttcacagaaac

SEQ ID NO: 139344 - DNA, 1008 bp, Homo sapiens
cttgccccagatcttagaaaaaaaaaaaggaaaaggatcagttatgtcgtgtgtctttgattaaagaattcaaggatgcatataatattttctagaaaggtttccatcaaaaatcactatggttaaaaagatgtttggttcttcaatgaataccctttagttatctagaaaattaactttttatgaatcaaccttattttccaagaatgccaaataaataaagagttaatacataaaataagttctaattagtatcttaaatctgttttcttaggcaacttaaatcactttttactagtacgtatcaaagttattttgaaaaaaatcatagttttatttttcaatttatcttcagagttaggacctagaataaacttaatttgagctggatcgccttgaagaaaaattatacctacagaggtgctaatttaacttttattttctgtatttcagattgaagtggtgcctgattgtcaggagaagagaagttctggtccatcctccagtttggacaatggcaatagcttggatgttttaaagaagtatcctttatttattaatataaactcacatacacatctaactgtgggagtctggttcagtgttcaaggccaatgtgattagaaatttgagttcacagaatggggttttactgggtgtcagaagtccaggatttaggcctggccaacctatagcctatttatgtgatttgaagaaaattaactaaactttttcagaatgttggtatcttcttttttttaccccagactgaaataaaatggaggttttcgtttatcattcttaaaaaaagttttattattatttttcattgacacataatcattgtacatatttatggaatacagtgtgaaattttgatacatgtgtacaatgtataatgatcaaatcatggtagttagcttatctattaattcttcagctttattgatatataattgacaaaattatgtatatttaaagtgtacaatgtgatgctttgatatgtgt

SEQ ID NO: 139345 - DNA, 1397 bp, Homo sapiens
gtgaagtatggagtctagagaacatagcagcccttcgttttcctgagtgtgcctgtcactggctcctgctgaggagggaaggacaaaaggtttgttcctttcctggagagaggagtctcatgcagcctgtgtgagtaacagccttttcagcagccctgagaattaggatctaaacaatctagtctttggttggaccatgccttcggctttgtaggaacgtctggattccttgcttaataatacagtggctcaccctttttaaactaaacatttaaaaaataaagatgaaagttttgaattttgatgacatgtttaacattttatcatgctttggaaatgtttatatggtggttagaaacattctgagagtagattatatgaatttgaataccacctctgcttcttggacaagatattaaccttaattccttatctagaagatagggatagaagttgttacctacctcttaggatgattttgggtattaaaaaagaagatatatgcatagctcttagaacagtgctcaatatgtagaaagtgccaaacaagtgtagatgctctaattagtagattaaacttagattgttttcaaaattctttttgattgagttaatcaatgagctacaatttgattaaatgtttttgtgtcagaatgaatactaaatctgcaaataattatgagcactaacacctacctcaatgcttggcaagtaagtgaatgtttgatgaatgagagaatgggtgaatacatagcaaaatcatgctcagtaagaagctgaaatcatgtgagtaagtccaaccaaacattatcttctatagtgtgattttaaaatactaatataaacatattggaatattaactcaagttatttaataaatatatatgtatttctattaaaagtgctgactttaattctggtttgaaattcttctttcacatttctctaccagggaagaagacttggagacaaaatcagagcaacttaaaagtaaatatcattaattaattcaaaattgactttattgctttagttgcagagttggtatgagccttaaatcacatgtttcattcactagacaaatattgtgtctttgaaagactatttaaaagaaaaaaagctgctgctgcattgtgtttcactgcattactggcatatccccagatatgccagtttctcagtatgagctgtttctcaagtcctggctcaaggttagaatcatttctgtagaacatcttgtatatgttccagcttctttttaccaccacccaccatcacttcaataatcgtaagtaagcgttgcacctttgtgcagaataaactttctttcatgagcaattccagtcctacaagtatgaagcacacaggacaggttctaatggaccatgcagaggcta

SEQ ID NO: 139346 - DNA, 1005 bp, Homo sapiens
gttattgagaatgggagatattgacagcgaggaataaaatgtaaaatgtgacttgagctcctaaatctggatctttagcctagatctttcttctaagctttggatctctgtttataatttgcctttttgaatttcccataggcaactcagactcaacatacctcagattaactcatctctcctgcaatctttctactcttcatcttggtgaatggcactatgatttccccagttgcccaagcctgggaccttggttcctcctcacttatgccctacctctaattgatcaaaaattctatatcctgtggatttgtgcctactaagtatctctctcgaatccattcacttttttttttcatccccactgctatccttactgccactttcctaatccgagctaacatcatcctggccttggcaactgtgacagtctttctgtctcttccacttaccctgcccacttcttcttccctttcctaggtgtcttactttgtggacattacacacactgttctctctctggaacactatttcctttcctctccctttcccacatgttagcttctactcctctatcagatttcctatttctaggccacttccttcaggtaagcttttcctccccagatctcctccttccctgcacccctgtttgcttaggtgttcatgctgtgtgataacaagtacccccaaatttcttcttggctttagtagaattgtctgttttctgtctctcttgctaaactaagctctgtaagggcagaaactgtgtgcagttcatctttgtatccctaaacacagagcttagcatatggtgtaggtgctcaatcattttgtatgtatttatattgttaaaaatgaatacatctaccttgctttgaagaataagatgtgtttctcataagttgtgcacatatttattttgtatctcttaacgtatttgcaaagaattaattggcaaaactaacaattgcctcttaagttacctttaaaaataagtttgga

SEQ ID NO: 139347 - DNA, 1198 bp, Homo sapiens
gggataaaacccgatagctatgagaataaaactgaaataggttgatattcttgagcagaagacagacctcggttagatttctggctccatgtactggctgtgtgtccttgaacagttcacttagcctctttagcctcagtttccttacctggacaataaggacgataatacctattgactccaacaggttattgtaaagatagggtgaaaaaaattgaagactataaaaaaatacttgataaactggactagtcctttcctctggttaaagctgcttgcttaattgtcctctaaaatctcaactctttctagaggttcttaaagtggtacaccttgggttgaggaacggagttttgaggagactgttacagatccatgcaagtcattagtcactcattagcacattttgttttgtattgtttcatttttttctgatattcttatttaatggcgttacaatttccttctgcagtgggagttggatactctttctttcaagcatgtaaacttttttcaaaaggtacccatctttattatattacttttgccaatacatttttctgagtttgtgtacatgtgaaaaaccagtttggcatctaaaaacagcagcagttcattgttgcattctacctgcaagtaactttttcctgtttttcataataaccatccattattctctttgtattatgcttatgttggaaaatgactatataaaatgtagattatggttctaaattcaatgtctttcataaagtgaccccgcaaaaagaataaagaaaaacaattggcgatgctaaaatgaatcaggccttcttttgtttaagatacttcatgatccaactttttgttaggagtagcttggatttgcttcagtttgagactgcctaatgtatgtatgaggatgaaggcagcttaataaataagtgacatggatggataaatgtttttatctattatacatcatgctttgtaaattaaatcaaaacattatgtatgctacaaaccttgttcatttacctaattgctctgttagtaatagggattataacaatccattccaaacaatttcttaagacttttaatcgctaagccaaatatataaaatttggtcaactcaaaacataagtattaatttctcataaaaatgagtcaaactgtttttttgttctttggttttattttagtttttttttttctt

SEQ ID NO: 139348 - DNA, 2777 bp, Homo sapiens
ctttgggaaggaaactttattcttgtctttagccatcattaagcatttgtattacactttatatttttctaagaatttcatatttcagttactgattttgggaaagtaacatgcaactaagtgttagtgctgagaaaatggtcggactcctgctgcagaataaattagttgttgtgaaataaatgcagtgtttcccaacctcggctgtgtatcagcagtatctgtggagctctgtaaaagtataaatgcccaacttatggcccagagctactgaatcagaatttctgggggcagaacccagatatcttttttttttttaacagctctgaaagcatttctgactcacggaagccagaggctgagaaccactcacttattggacaaatatgttttctctttattaattcatattttttttttttcttcttgattttcttaccaggctcgtcaatgctgtgatgaaggggaatgtcttctagctaatcaggaaatagataagtttcagtctaaagaagatgctcagaaagctctccaagacattgaaaattttcttgaaatggctctaccctttataaattatgaacctgaaacactgcagtatgaatttgatgtaatattatctcctgagcttaaggtagaggcttttttattttcaaataaatatttaaagaaaattataattgcagtactgtgggtaggaggagttttactacctcacagctaactttatgtcaaattgcacttacattgtcctcttaggggtgatagtagtgccactgtcaagcatcaaataattcaaaggcatatgtttgctatataatgaagaataatttcctttttgagctccaaatccattattttaaaactcttttatgtgctaggtgttctcacacatattttgttgtgcatcactggagaaaggcccaaagctcttctataacagaatgttgggtccatgtcaagagcactttaccccagacatctttcctttgtgctgcagtgaccatcagcagatgctctgtggatgatgttgctttcctactcagtttgagaatgaaagcataaagataggatttgggtcttcttggagaaggaggagcaggcagaagttggtgttaacagggtggacagctataggttagttcagtactgcccccttggaaatgacatgaagaattttccacattgtagataagagcatttgtgatgctatttgctgctaaaatgtgtagttgactctaagattggagcagtatctagatccatgcttagcggaatatcctaggggatgccccaggaaatcagaaatgcagtcatggcaatagccaagtgattctctggaagcaaccaagcttaactctagctgcctcaaagcatctaggagaggtacaaaggtgtattatccattggtggctctgaggagcctgctgcaacatagaagactataacaagaatgtcctacagggtaaaatgtaacaaaatattataccgatgttattcatttgattgtttttataacttggtggctttcttatgctaaacaggaaagagcaatatgccttctttcccagccattatctgattcagccaatgaaccaatgaagggcaaatcactctatgcagtgaccaatttcatgactgcttcttggtaattttttccctcaggttgttttggttgagattttggttttatatccatgtgaacataatacattaatctgtcttgttatttttctaaatgtcttgtagttatattttaaactctaaattatttttttgaccatctgagtctgagaaatgtaatggggtttgtaatgacctcatttcataaaatatttcctataattcttatacaactcgcaggttcaaatgaagactatacaactcaagcttgaaaacattcgaagtatatttgagaaccagcaggctggtttcaggaacctggcagataagcatgtgaggccaatccaatttgtggtacccacacctgaaaatttggtcacatctgggacaccatttttttcatctaaacaaggtaaaatgtcttactttctctgtctctttttttcttgctattgtttatattgttactcttgatgtaaatactgagtttattcttcaatgcggatagatgaaaatttcactttagcatctttggtcatatttatattgtgcaaggcaagagtcagattgaggttattgtacagtactaaaacatagtagtgatatagtacagtacaaggaattgtgaacgtctcagtactgagtactccagccttgaaaatgagtatgaaaattttaccagcatcaaacttgcatttttttccagcaggtgaaggaaagtatatgaagctagtatacacatgtgtgcatgcacacacacacacacacacacacacacacacacatatttactgctactctagataagcaatgatttggttcctttttatttgtataaatgtgggagtacaagtacatagagttttgttacatgaatatattgcatagtggtgaaatatgacttggttcttataagcttctagtaagtgaatggcttagataataaaatggattgccttttctaaataaatgctgttaaatagaataattttgttggtaatttactattacagagttcattttctagttttaatctcctagttttatccatgtaagatctattttctttctaagttctatggaaataataattgtccttataatgtgttgaactactctggatatggatggctcaggggttcccttgagctgcc

SEQ ID NO: 139349 - DNA, 1062 bp, Homo sapiens
gtggttccatatgaattttagaatagtttttctaattctgtgaaaaaggctgttggtagtttgataggaataacattgaattggcagattattttggacagtatggccatttgaatgatagtgattcttcaaatctatgagcatggaatgttttctccatttgtttgtgtcatgtatgatctatttcagcagtgttttgtaggtctccttatagagatttttctcctccttgggctacatgtattactgggtattttattctttttgtggtcattgtaaatgaaattgcattcttgatttggctttcagcttgaacattattggtgtatagaaatgctactgatttttgtacattgattttgtatcgtaaaactttcctgaagttgtttatcaattctaggagccttttggtagtctttagtgttttctaggtatagaatcatgttgtcagcaaagaaagatgatttgacttcttttctgattcctagttttttgattgtttataatttattagtgttcttgactattgtggtgtttcaaactgctgctgtgtccttgtgacatactccaacatttaaataaatcactttcttactttctggcataaaaatatattccaagttcatcttgtacctattctgcctcaaccctggaatcagttatttccttgaggagccctggtttctttttctgggaaatggtattaaagaccaaggtctgggtgggagatgtgcttattacttctggagggcttttgcttttaggataattcaccagagagctggggaatgatgaaaaaaacacttagatgaaaattctcaggtaagattttgttttagatatttgctatatatatatacacacacacacacacacacacacacacacaaatgtatatatacctatacatacctcacacgtatacatttatgcaaatacatgtcctcatatacgaacctacacatgtacatggtgatcttttatacatcaagagtacacattgatatctatgaggttaaattttaacagattatagctatttctgtgaataaaataaccaaa

SEQ ID NO: 139350 - DNA, 1053 bp, Homo sapiens
tgagatagcaaaagtaaaatgttttacacagtgcctagcatatggcaaaccgtcaataagtgcaaatagtattattaatctcattattctagtgatgcttctgaggcatttaaatttgtagcaaagactgtacttctgttttagaaatttacaaataggcaagggccctgcacctcccaagtatgtctgtggtatatgagtatcttgacttctaatcccagagataggggaacccttctgaagaaattaatgatgtcccattaaattaggattccattttcctcatacttgttcttcactcaacatttcattcattaattcatttaacaatgcattcattcaacaattcattcattcacatgaagatgtattgccaaaattagcaatgcctagcctttaataacctgtaatgctataaataaacaagcaaatattttgatatgcatggttaacagatggtcatatggtctctacattttgcccttctttctcagagtaattgattttagaaacaaaagaaacaacaaaaccgtacttaccattttatggcaacaaaggctttggggccaccattccaaatattctatagtacctgaaatgagttgttgtgactagtttttcccccgtttccttcaattatcaccttgtttggaatgctaatgcttattcacaaatgataataaacaaatataaagtgactttactgttctcatctctcttcagaagtaaggttattataaggcaattttgccaattggagagtttatagaataaggaaaatactgtaattttcaagaaaataaaacaaactactcaatacatggcatctttaagaaatagttttcattagtgtccaagaaataagtcaagaaatttggataaaagatattcaggaagactcttaatcttccttcagtttcttagagttttagatgaagagttacagttgattgccaagagcaatgccatatttctctagcagaggagagttcatagtatatgtgtttgccgttatacccccaataaaaacaaatacacttactgatccagttt

SEQ ID NO: 139351 - DNA, 2185 bp, Homo sapiens
tgggatatgttactccgttctccacttattttgcaatgtgtcctccttctttgtcttttgaattctttagtgtagcagttatttttgactgcatactatgtgccagcaagttctagacgctggggaaacattggtgaactagaacaacattctgatccagttaactcctcgttatgcttcaagatctttttgaccttcctatgtctcggagagtttgtgctatcatttccccttgtatattattctaattcctttgattacttatcaatttagttaaagaattgctgattagtaatggactctgcagttgaactgttgggtagagattgtgttttcttaatttgtgaacattcaatgcctaacagagcttgatattcatttaaatacatgaagtagacacatagaagatgttcagtaaatattgattggattaaaataaaaatataatcccataataaagttttctttcattgtttagtgtaaatacacagacaaaaaccctttgacttttagggttatcctaggaaactgccacctaattctatttgtttttataggaaataagtgcaatttgagttcaaataactctaaaataagatttagagtctatttcttcataaggttggatctacttctttagtgtgagaaaatttcgtaccagaagtgttgcaaggatctgacctggagccttacattatttttctatttgcatgtttttagattttatcaatatccatttgtaaagtgttggccttttactggcttttatgaatttaaaatttgtttccttcagttacatattttctgatatgtgctcagttgagtgtgtgttgacaattttttttccaatttcttttgttctttctttctacaggcttccttccctgggaacttgcacttggttttggttttacgtcctaccagctttcttcaacgaacgttcacagacattggattttggtttagtcaggaggattttatgcttaaattaccagtaagagtatattatttaaatgttttgttcctctaattctcatgaagacctgtaccatgctgtttatattttacatgtgcccatgtgtcatttaaaagaaaaaaattaaaatgtcttttaaaagtatacatttgaaatgcccaaaagtctttcacttctaccatttgaaaaagaaatcgattcatcaatttataacaaagcaattacttttgcaaaaaatatatgtcatatatgttatatatatgtgtatatatgtatgtgtgcatgtgtgtatatgtatgtgcgtgtatgtgtatataagcaggaaattttatttttagtaaaattgagtgtatgttttatgtatttgaactcccgtgaacttacatcctgagctagtccagagtaccatgactttttaaaaatatttttgtttgtttttaaggttaggaatagggtgctcataaattttgatacttttgaaaaggtcagcccctcctgataaattataacttactacataaagtccttttctttgttgtgagcatagcattcttttagaagctggaccattaacaatgcaaacttttagatggaggaaaattaggcgttttggtttctgtggagattgatttagctttacagaaaatgttttgtaaatagaaactgttattatctgaagaaggtagcgcatacatgtatgggggcatgtacaggagagaactgttaaaaccatttatcagaggtaactttctgctaaatgtatgccaaagttcattttacagtttaatggagggatggcatgaagggcagttaacagtatcttttttgcttatttatataggttgttatgctgagctcagttagtgatttgctgacatacattgatgacaagcaattaacccctgagttaggcggcaccttgcagtactgccacagtgaatggatcatcttcagaaatgtatgttgtctttgcccttactgtagagcctatagttcttcatgttagcctttaaatctagttctagaattctttcctatttgaaaaaaacaaaacaaaacaaaacaaaaaaaccccagctttctgggccctcatttttcacatacatataaattcaacatcttggttttcttccataggcaatatctagaaatgatgagcagtcactgaggatggcaattgaaggagaatcctagggaataaggagatca

SEQ ID NO: 139352 - DNA, 1048 bp, Homo sapiens
cttttatgttttataagttactttaaacattctagaaataataactagaataactgaaaagtgtgcatagggtgatgaattgcctcccttagagagcacacacaagagtattaaacaaggttaatttctagacttcggtagtgaaatgatgtatttggtttacgcctgctcttgttgttattgttgttgttactgctgtaagatcatagaactaggcaatctggaagtacgtgtgagtaaaagggagtaaatctgttctctgggagggaaagatgagagggagcttattttgtgctcgttaccttgaagagcctgtaagagctgctgctgagggctggggtgggaccacgtacagtgattggacacatggctccgagtcctatgtgataggcagctggttcgcttttactgagatgtctttaagcagtcacatgctggaactccagaaaaatgtctgcgagaacctaaaaccaatgctgtttcctctctcgtgcaaactatttttttaaaaaagcaaaaacacattgaaataaaacaagactaacctttgcccaaatccctttgcttttttgacaagttctcaaaaatgaattatactttcaaaatctcagtttttattttggggaaaaagaaattgtgctttttcatgtttatataaccatacagattagaggttcttaaagcagcatacccaagaatttagaaatataatattcccaaaccaaaatgggaaagttcactggtcttgaactatatttgctttgatatgtgcatctgataccctatgctgtttgattgttcatttaaatactagctttaaaatggattatcttgagaattttagttgttacaaatattggtatatagagaaaaagtactctctatatatacttatatgtatatcaacatagatacatacaaactaatcttaaatgtatatggcttgtcaggttaaaattgctcaagagtgttctgtcccctctagattctcatagccggcaatcacagataaggacgtgtccatattattgatattgattgatgttca

SEQ ID NO: 139353 - DNA, 1036 bp, Homo sapiens
tgcttgtggtatagtttctatactcatactcaagagcacattaattacatctcaaccattagtaactgttggttactgtttgaaataaaggtaaatattgaatgcaagctaatttcaagtgcaaaagttggcattcagaaaggatttctagtgaaatctaccattgtgtagctaggtataattgcctgtggtgtattatttcaaacaagtgtctgtgaaataatcatacaattcaatttgaatacctttatttgtagatttcaaaacaaataaaagcatttaggttgtatttcataattaatgagaggagactttattttagttatacattttggggaaaggttaatttgggagagaattgtatccgtcttagaaagtttgcatgttctattctttctagattattaccaggacaaaattttgcaaactatagcctttcacaaggcttaaacccagaatacaataacagagaaaacaaaacagaattgaaatttaagtcacataccagggtaggacgagagtaaaaagcatgagttaatactaccttcacaaagattcttagcattccaccttaaaaatcaaactgcgcagaggagaaagccagtcccatcaagcctgctcctaggaagagagctggtttttttttcctcctccttccactcttaggacatgcctgatcttcttgagcagtccagcacaagctaatccacaaggttcaatcaggctaagtaattggaggaatgtgttaactctgaattacaaggagcagaagggaaggatctgtcagctgactaatcagggatagtggtttttttttttttttcctccccagcattgctgccactgtgctaatggaagcagccacggcagctttgtttgatagagatttttggctgccgtttttaaatactacccaagaagcagctcgtatttcatcaacgttgcgttgacaattggaaaagaaaagtgtaattgcgtacaggcgaaatggcagaagcaaatccccggagaggcaagatgaggttcagaaggaatg

SEQ ID NO: 139354 - DNA, 1078 bp, Homo sapiens
tacctattgaagcttgaaagtgatatttttagggcaaatagaagttatattttccattaaactgcatttcctcaggagcagactagagttagaaaaatagatttagcagtgtgattttgaatgagtgaatggatcattgactcatgatggattgcatggaaagttaaatctgatatcatgaaggacacttatcttttgagttttcccacacccaagattacagtattctaaatcaattttagtgacctatcttcattacactatcactttcctatttaaaagattgacattaatgctgcaaaagaaattttaaatagtgagtaagggaatatgtattcagattagttttctaagataggactttgtgatagctttccaattccaaatctgtcttcagtcaagacatcaaatgtagatgaaataatcagaaatagaatgaaggcatatataacaaatttgcattattattaagaaaaagttcttatttcttcttatcgttcaggcaaaatggatcagactcccggtttaccattattctggatcgaagattggatacatggtcttctctcaaaatctctctccaaaaaatctcggtaagtatctatgcattatacagtaactttttatttttgttttatattatactttctgttttgggaggtatagattactttggtactgacggagacaataaaaattgatggaatgtgaggagggaaagtagaaggagaggttgtagcagagactgagataaataactctacccaaaataaaacctagtaagaatgagtgagtagtttgtggctccagttatgagtgagaagagattcatggttctatgtgcctttcaggacaaggcaagtttttatggaagctttttaaaattatttatttatttatttattttggtggaaatagctgtgttgcatactcgtatgtgaaaaagtataaagaagaaagtttaaaacaatagtaatccaaccaccccaaaataagcagtttttaacatttcagtgtacaactttctagatttgttttaccctaggatagggtagggagatgagtcacatataaaatg

SEQ ID NO: 139355 - DNA, 1050 bp, Homo sapiens
gaccatcacctatttcctatagggtgctctgtatcttttcctgctcaccatgacactaagagatcgattatatcaaattttccacttgctgtcaagccatcattcactcattttaaatttaggctcattggtatagaaacagttatttcccaaccccttggttgtccagattggggaatcagctattttccactgtatttattatatgcatttcatgacattttcttctgactatattcattcattttactctctttctttttctttttttattgagaaactactctgccaccttttaaacttaaagtgtcaggaacttggagccattttggttttatgtggagatcatcatctttgcaaaaaagttgtgttgctgcaaaacagtattcaaatctaaaatcctcttcttgcttcgttgttatatacatttttaattcagttgattatttttctattgttgtaggtggccggggaaaggacaatgcttggatcattacgtttccagaaaactgtaattttagatgtataccagaggaagtaatagcaaaagtacttacttacctgacatctattgcaaggtatagtatttcattacatttttttcaattcgctttatatcagatatccatctgaatgtcataacatgaaaatggcttaatatagctattattatcatggtgaataaccaactgacttaacttcagagtagataagaagtacaacttagaaggagaagctggcagctacctaaattgttacaaaaattatcctgagaatctatgaaaataaaattggggatctaggagtatttgttcccatcaaaaagaacataggttgagaacgatggtcatacatatatgctttaatttgcttaaaaggaaatattaccagccaagagtgagtacagccatttttcatttcttctgaatataacacaagaagactgaatcttaagtagattcaatagtggtactgggagatactaggaggaatgtcttgaaattaaaaattatttggaactagaatgctttaaaatggaaagtttaaaaa

SEQ ID NO: 139356 - DNA, 1036 bp, Homo sapiens
tatttacactcccatgtttattgcagcactatttacaatagccaaaatatggactcaatctaagtgccattcaacagatgaatggataaagaaaatatggtatatatacaccatggaatgttattcatacataaaacagaatgaaatcctcttatttgcagccaaatgaatggaaatggtggcaattatgttaaatgaagtaagccaaacacagaaacacaaatactgcttgttctcactaatatgtgagagctaaaaaaatggatctcatgaagatagagagtagattggtggttaccagaggctgggaagggtagaggggaggggatgaaggggaaaaaagaatgtaaatatatttattaccactgaactgtacacttaaaatggtaaattttgtatgcatattttaccttgataagaaatataaaataaaatggaggtaatgaggtgaggagtggggagtgacttgttgaaaattacagagcagctaagtggtcaagcccacactaggccctggtgctcccactcccagcccacagacttttattttgggtcctgaggcctctctcattacatgagtgcttaaattgtagagtaagtggacatagtttccatagctatgcaagagtctgagtggtatcagagaatcaagttgttcatattaatacttccagatctgccacctgacataaaatgcatcaattcgtctttgtacttgttcctactgatcaaagcaagggagaaatttgggtctcctattatgtaggaatatttttatgtctgatgctttctcatttaaaaagtagaacacattttaactattgccacttttgcaggctcctcaggggagaaagtgttcttgtatcttttgcattaccctcattctcacccttcttccatggctccatgcctgaaaatgtcaatatgtgacacatgtttgtagctgttataaacacattcttttatctgattaaacatctagcatggaaagaataactgcgagtgtaaatgtgcatgccttgatctgaaatatatc

SEQ ID NO: 139357 - DNA, 1059 bp, Homo sapiens
gtgtttttaagggtgtttatcagattacctgttgagttacagccctttatttggcttctaagtcagctcctttttgggcttagcaacgagtccaatgtaaggagaatgaatcctttttatctgtgagtagttgagttttctacatgagacagcttgacaaccttcctatcaaacgtaaatctagtcaacaaggaacatgctgtaatgtggacttgatccaggtttggtgatctaggctttttatttctcatgctctaagtgaatgcatttaaaaggtcagcaataggaacagtataaattatttgttctcacttttatatttcaggaaaaaatccgtgtggaaattcgagagggtcagctacaaagctgggtgtaactcagtgtcacaactttatctaaagtcagtattttctgtttctctttgttctcagcaacaatcttacctcgtcccttgcagctgctcaattgataactgtgtgtcttctgttgtctttcctgtgttatcttcttccccttcagtctgtttccaacccagaacttgatcatttattaaagtagtaatattttctcttgtaaccgtgatttcatcctttctctttagtgtggaaatgttattttattggcacagttgtgggctacattttatgatagaaaacatcagtctgtttttacatctatggattttacatgttgttggatctcatagaatgtagggtaccttaaaaagcatttactggccgggtgcggtggctcacgcctgtaatcccagcactttgggaggccgaggcgggcggatcacgaggtcaggagatcgagaccatcctggctaacacggtgaaaccccgtctctactaaaaaacacaaaaaattagccaggtatggtggcaggcacctgtagtcccagctactcgggaggctgaggcaggagaatggtgtcaacccgggaggcagagcttgcagtgagccgagatcgcgccactgcacttcagcctgggtgacagagcgagactccgtctcaaaacaaaaacaaaaacaaaacaaacaaacaaaaaaaaacag

SEQ ID NO: 139358 - DNA, 1143 bp, Homo sapiens
tactcatcagagtatagctcagggagatatgtaaatcacaacaaaatttattcagtgtgcattccagtatggtatgaagatttatttcaatgatgatgggtcatctattaggccacacgatactgtgagtgttccacgtaactgatttttctgggtaactgaggttcaacacttttagtgcctgactttttccccttaaaatatgtatccattttggatgagaagcttttcaaaaatactatttaccttcctgacccctgaacctggaaataattgcatccttttttgatgggttaagattgtccttataatagcattagttctttcaatgtgctgtattcagtgctgcctctgggctcctaaactgtggagggctgtttgtccctatactaaatggggacagattgttctgctttttaattttcaatgcctgacttttaccctctaacttttccgtagatttcctctctgttagctgatattttttgctgctgttaatttaactgtttctactggccagttgttattgcctaatcctccatgccccctcctccattgccttctctgagtgttacgaactagggaacaagataatcaagcttgttcgaactgtgtgaaaagtataatagaccatgagtaggcctgtggggaatctacctcaactaatgtatatgagctttagtacatggactctgtgatatctattccaattgcaaaacatctttttcttttctttctttctagttcctttgtgtgttttggagggttgatgcagttaaataagttatcagtaaaaatctatgttctcctgctaatcgaggcataataacatgtgaaattgtaatattttacttccttgtaaaacaaacaagtgtgttcagaatctatcagcaattccacgtgcattttatccactgcatttctcagacatgcctgtgcttggcaccagaaggcacttcattcttaaaatttgcccccaggtttgaaagcaattgtccctgtctctgctcagcatcttcttaagcaagcatcctctgaaggctcaataaacaacttgcaccttacctactctagggcaggagcagaggccaatcccatgaggagagatgccttctatctgatggctgacaaggccagtgcctc

SEQ ID NO: 139359 - DNA, 1236 bp, Homo sapiens
gtgaaatgtcttcattcaatgttaaacacatacttttttggatataaatgaccatatttatttgactgctagtttttttgttttttttttgtctttctggcatgcctgtactattattaatgtttatattgtaccttgatttggaaaagtattggagttaatctgtattatatttatatagtccatatggcacatttgattcttccacatatattttgtgttaatgtttaggtatgatttttttctaaattctagaaaagaacataatttcagttatcagaagccattccatcattatagaccctttttcattatttcatttgctctcatatatcagtattatttttgagcattttgttacatgtcattcacaacttacctaagtgtgctgtgttctggtagcccgtatttgaggtaagctgctgaaaacaaaagtctctatattctttgcctattccaaagagctaaaaaagtctaacccaggaaagcttttgatattttgtgtttgttttcttgttcttatggttgttgttgctgtattatgattgctgttttacataaaatctatgggaactgtgaatacagacaagagagccacagtagagaggcttgtttaatgcagtaccattggagagttaacagaataatctagtagaaaaataactggttgcatgtaaaattccttccagccagaaagaaagaaagacaaggagtaagggggatttagagttatgtctcagctacacattacattgtgatactgcagctcaaattcagaatggcaatgatacatgatatcatggcctagatccttgagagggacctggctttcctttttaaaagatattttactgaagagctaaaaactggccagtgtggggttagcagatcgaataacttgaaatagaccatgcagtattcctagcactcaatgtaatcaccctatttgtgacagagaaagggaaaaaaatataataagatcatctacctataatttgaataattttgagctatcaaaatgtctttgtaattttcacaaccgctgtccattgtttgaggatgttacctactaaactgaaaacattcattccatatctacttacacatacaccagcaacagtataaatgtaagcctaactttgcaaaattcgtaataatttagtgatggaattttttaataacatgcagtatataaatgtgcagattttatgcgtgttgacaaaatcatttttcagc

SEQ ID NO: 139360 - DNA, 1266 bp, Homo sapiens
aagcctgaatctattcagctgacaaatgaagaaaggattaaaatctggttatagtgtcactctttttttcccctgcatgtgaataaaacttggcactttgttaagacagttgctttactctcataacaaaatttactacttatttctgaaaatgcttaacagatggtttcacattattaaaataagccttttaaatctgtatattttacatttttcagaatccgaatcttgaactgcctatgttattgtcctacaagcatactgacagtggttacagctaaaaaagaaagcatgaagaaacaactacaaaaagttatcatctcaggatacttgatacgcaacacactaaaccactctcatgtctagagttcacaataaatgttcattaaaataccaaatgattctcttaagcatttaccattattgtaagtagcctttatggccaaagctgtaagttaagaattatatgaaagttgaaagcaagaatacttagaattctggctttagttagagtaatataactcaaatgggtgctcttttaacccatgaactttgtgaatggatttaaatacaatagtatgaagtagaagttatgcaatgagaatgaatagattttgctaatactactttttttgcctggcagaagaaatagactatttggatcacatttctcattcctcctaaatgatcatcttaattttttttcccaagtacataaggaatacttgaaaatacagaataactaaatagtatcaatgcatcagacagaatagttaatcccttctgtttacccatgtgctactaatgtcttggtagaatattcttgccaaaaaaataccttgaacgcttatgtggaaagtgttaacttacgggtatttttgtgggaatagaaaaaaattgtttattttttattcttctgaattaaaccccacttatgggtgtaagcctactagacttgaaaataaagtataaaacatttccaatcacttagtagcccctcaaagtagttagaaaataaacagatttttccagtgttgattttactgggatctgcagtaaggtggtttaaaccatagttatataaaaataaaggtcattctgaatatcagccttttataattttatgtgaagaggaagaaatatagcttattttaaacttttgacggtttttatttgaaagagattgcatttatgcatatatgcagtgctttttcttaaacttggccaatttggaaagggggaaggagccaccccaaaacggtggtt

SEQ ID NO: 139361 - DNA, 3379 bp, Homo sapiens
caatatgggtaatctttattagcagagttgttcaagtcatccacattgttgaccactcatcttctgttttgcttgggcaatgccaaaactgagtctgtaaattaccttataatttcaggcacagaatcagaaggaaaaaaataaccttaggtttgccagttaaactttatccattttcacttttctgggtgttttaaggggaaaaaaaataataccttacccaggtaaaatttagcctatctttctaaagaggactctgtaggaaaaacagggaaaccaatcaaattaggttgtaagaaaggaagttaagcattggtcagaggcaaatgggactgaaatgtggtatcaccaaatgttttcccattgttatttttgattaagtttttatcctgcaactgcttaagagcagtcagtcccttcatagtgtatctgtacagttgcataggggagataattacttcaagatagattggtgattggcaatggaccctggacataactctttgaccaatggattttgaacaaatgtaggatagtgaattaatgattagagataagtcttattttaacgagaagcatattttaaagctattttatttaaaatagtcaattttcccattaacaaaataatttcaaattgatatgtagagaaatagtagttggcacgtaataatagactattcctatctctgactctgcttttacttcagaaaataatgtcttcaaaactaacatatcatttcggcttcgaattctcaagttttctttttaaatgtcttacatttgagagattatttactttttttttttttttggtttctgcatttctcttttttctactgcaattttccaccttttgtgcaattgtgaacaaggtaacgaaacgcctcccttcctcaggaacatctgctatcttcatgctttctcaaacttccagcaatcacagtttctcttggagtgaataaggtgatttcctttcttaatgtaccaacttgcttgcattctcatttgcctgacaccattttctaattctttatgaaaaattacttctcatgactcattttatatcttctattgatgcttagagtattttgtcattttcttttaatcatgtgttcaccttccaaattgtcacactggagaggaagtaatttttaaaagcttggactacgggtctgtagtcttcattgatccacggtatgcagtggccatggcgtgttagagctagtctgttcaccaggacaggaatgttttgcacaaatttctctttgtttgataatacggcaccggcacaactctcagaggtgttcaccaaaaggatggtaaggtttactaatcaaaccatattgactcatcttaccatattacttaccagtgccattccaaaaacccaagtttactacatactactgttgtctgtttacttctaccacaaaaacaattcgagttggagactttcttaggcctttgaatgtattcatttgaatgttatacatttactatatagtgtaatcatttgtacttttggccagaggagtagtctataggaaatgatttttttcttttacctttttttaaatatataatcaccaggtaggttaaccaattttcaaatgctttaagtatctttgcctcactattacagagaaatctgagctgtagaagggcatctgactcattatccgccagaccttcagtcagacctcttcttttacgaacattctcagacgaatctaatgtattgtaacaggtacctagtgttaaacaaatgggctggctttaaaaaatcggattaacagcattataaagaaaaaatgaaaatatcactctctaaattttctctgctgttggtgtggtgaactttacaatattctttgcaaaaatataaagatgcattacttggaatatggggaaatatgcatttaaaatattaaacattaaaatatgataagccccccaaataaaatgttaaacatttttcagagccaaatgttgatacagcatatttaatttgtaaggggcaagttgtcatggcaaggccaccatgtgaaaatgtttgttaatattgatcaggaaatataactttgatttataaagatcatttggaaaactaaaagtaaatattccaaaattgcatctgtataatatcaagccaatttagcattgcatgttctcttgggaattatgtgaaaataactaaatgtgtttgtaccttcatgtgctgtgtctgtgtgtttgcaggtactgtatacacttatgtccttgtaaatgtctgatctccaaatatatatcaatgaaccagtctaatcataacttttttaatgtcaagttttattcaagctaaatgtttcaactttcagaggtaaaatatttcatagccattcagggggatgcttgcctaatgatataaaatgctttataattaatgtttccaaaaatgattaaattcactttataatgtttcatttacccccaaaaatatttgggaggaattgatacgccgtgggagggccccttgaactcagaatgactcctttatgtatagtctgtatttccttcagtgggggcctttaacaactcagacctctggaggtcttttatccatccataggaatttagagtaattaatgaacaaggcttccaagcttgtcagcttggaaacaactctacacagcttaaagcagggccatctttcatgcacacataaaaattaatgatcatcatgaatacaattgtgggttagttcactttgaagctaataattgcgagtccaccttataggcccatttttttcaacagctgtcaactctgccaccctctagcaaagaatacaagttaaattaatggattgactccattggttcttctgtcttcctggagttcatcgcagtctacatctgcactgttattttagaagcagactcattttgccacagttagcatctttttacccatttttgaacaacttacctgagtatgttttcccttagtaatgaatctgcttcacaagtaaccttcaaggtctttgacccctttgtcccagattgcctcgttctaagctgtgtgatgcattttagctatattgtttctggctaattttgtatccccctggattgctctctttagcttggtctgtggtttgggggactgggctggatagaagacactgctgttgcttttggcctctccagggccttatctcctacaatgtctaacatagaactgaggaagtattttttaaaaacaattgtcttatttttaatgtagttatttcttccaggaatagattttcatgtggcattatttctcctccaaagacaataattagcagctagtttaggcatctagtttgttccttggttggtaaggaaactaccta

SEQ ID NO: 139362 - DNA, 1087 bp, Homo sapiens
tgtaaatcaatgaaatatatctggagtttctggccaagtagcaaataccatttcacatttccaatggagaaatttccacatatcctgtgtgaagttttctcatgtaagtcaccacaatcaaaaaggaggcttaacttcgctgaagcttgacaaaggaagactataatttaatgggaatgcacccagcaacatggccgtgcttagcatgggatgtcagcacaaacaggaagaaatattccattatgtagagaactctttcagagtggtagacagggaagggaagaatgtcaactgtctgagccaaagtcccagagaaagcattttggaaattttggagaatatagttaatcattataataatgatgattactattatgattcttacagtgtcatatacaaccatgggttcacagggcaatagccctgttagctggattagacaaaaataaagtttaatcctaatgtcgtggctgttgagatgggcctttatccattggcctctttgacatactgctaattgagctggtgtcaaagctctctagatgactgcaaaggaatgtggaaatttcattctgttttagctcattatctcctgtttaccccaccccactgccggttgctagctatatcaatttttttattgctttagttactctttccatgctttctcctgctttctgtactttcatttcctttataaagtagttttaacacctaatctattaactcctaatatttctgcttcatagaaatacttttatctccgatggttggatacaagtgtttgagcacaccaaaacgtgcttacagttgcagtcttgaatagataggtttgtgcattaaacacgggggtggggaacttggtatcatgctgatcttgtcgcagggtttttgcccataaaatagaagatagaaacaattaaaatctttttctcagaatctaaatattctctagctttatcaattggtaatttgcattctatcaatatgtctatcaactttcttcattccaccaactttcttcatttaaggtaaaaacaagaaaaaatgtagttgtcaaaacatgaataaattatttacctttgaa

SEQ ID NO: 139363 - DNA, 1035 bp, Homo sapiens
gtctgttgtgtttgagctttcacgacacctttgaaagttttgtagtttgtctacccttcctagctaccccttccctctcctacttcttttcagcttatctgcccccaccagctaggtctccttttgccatcatcttcctggctgccattgcctgaggacttggggcttgggcctcctagatattaccattacttcattccttgcccattccccagtactgagatatctgcagccctacacctactagctacttagcctgatcacacctccagcctgtacgccagtttagaggccttagggcagagctcagctttctcacccttgttctttgaaaaacctgggttctgtttagttcccctcttctctggatccctggcccaagctagatcctttcataggtatcattgtgtactagttatcagatactatagcgtattgcctggtgcaattcgtaaccgtcgtgaaatcttttgtgttgtatcttttcagcttgccttggatacccgattctggacgtggataaatcactttgtgatttggggttctttagccttctatgtatttttctcattcttctggggaggaattatttggtaagcaattgtacatgtgtgagcaatatgtaaatagcaaagtagatacatgtgtatgtacactatatatgtaagcattcattatactttaaaaattttaattatataagatgacacgtctttaatattaatggcctgaaggttatttgttagctggtagtgctactaatttcaggtaagattttaaatacacatatatagactgcacaagtcactcagaagacctccctttggtagcttctgtctgtttgaaggtgttgtaaacatctctctagtgaaactatagttttcagcacaacctctcgtgattttcagaggaaatactcatcctgtgaagtttctacctgatatattgaccaacagatacattattgtccatttggacccttattttctcttgatagtatataaccatgattcatgttactacaggtgtgctcag

SEQ ID NO: 139364 - DNA, 1050 bp, Homo sapiens
aaagatggcagccaggcattagtagtttttaatgatcctcaggggattccaaagtgcatcaaagtttgggtaccattgtgttacacctttctgaggctccttattattagcaaatgtgagtggtagtaatacctatctcatgtttttatgtggataaaaataatgtctgtaaaactgtgaacccagttcctggtatataagtaccattaaatggaagcgaattattattgatgttattgttgtcagtgaccaaaaatttggaagagtttagagagtttactccagtggctgagtcaggagatgattgcatgaaggtcagcctttggctcagtctgaccctttaccaaaaatctgtcaggccattaagggtagcccccttcattataacagggtcaaattccacgcccacctttgacatttcactgtatgtttaaatgaaaagtttcactaatggttttttccccccatttctcaataggaaaatttctggcaatgccatgctacagttgggccccttcttatattggacatttctggctgcctttgaagggacagtgttcttctttgggacttactttctttttcagactgcatccctagaagaaaatggaaaggtaaaaagaacctgtcattacatcttttggtattataagcatggcttgtctttttcccataggtgctggatttgtcatatacatactctagctgtaatcattttacaaactttttctgaagatacagtagttagttctcacagcttctttagaacaatagaagtgaaataagaaatcactttctgtgcatggctaactagagagcttatgtgcaaactttctggaaccttaacttggctgtaatttttactagatgaacagagttcttgggacttcagactcctgctctttgatgtgagaaaggtttttcccattttaaagtaaagcctggccgcattcagtttttactcatagtggccttccatgcttggagctgaagcgggtagctgccatatctttggagtgttggcccaatatgtgaagagaggaattctct

SEQ ID NO: 139365 - DNA, 1032 bp, Homo sapiens
tagtaggagatcccttgaagatttgtcatacagatctgcctagtaatctgaacctatttcagaggcttattttgcctcttttgagttttggcctgcaatttaagcaactgccaccagatggaaggaatgctctgttaaggagagcaaaacaagcgttaaaatggcaaatgttgaccagtggttatttatgtagatgatatcctctgtcttcgttagtatctctaggcccattatcatcttggttactgactcagcagtatttcttttttattactatcttttgtgcgaagaggatttctaaaattttcaactctatttggctgagctgagaagtctttccatcctctcgccattgcatcttcaaattgttattgcccactcccggagtacttcagtgacaggtcttcctgccttctgtttctccatttaatcctccttacataattcaactagattagtgtttaaagaatgccacttttcaacttgtcccttagaacctttactctccaccgtctcagctttagtctggcttttaatgcaccccacagtgtgaccctgtcttaccatataagtttaaaatatatacattcttgccttggttcctgccatcaacatgtcctattcatctttattcatagttcgagttctaagttgtttattcaatcggtgaacaaatatattttaaatgtgttaccatgtgccaaggcctgttttaggtgcttgaggatacaccatggaataagacaggcagtgtcccttttctcatgagacttacattctggtgggtgaggtagatacctgctctcccttctcaatggagcatccccatgatccccactgagctctacctgcttcaacctcagaacacttatttttttcataaactgtgactctaggaatactatggactatattttgcattgtaccagaactgataatgtataaatgagtgttgcttttccaggtgatgaccttgggagctctgactcatgctgcaggggcaattcaaaacctgttgagctcatttcttta

SEQ ID NO: 139366 - DNA, 1043 bp, Homo sapiens
ggtacaaggaaacttagagtctccattacctactttttcatttccatatatgctataggatattctttcatatgtgttagttttgcttcatcagattctttaaccacttcctctaaacaaggggatggctgtgtctgtggcttttcttttatatactgtgcgcgcgcacacacacacgcacacatatgcacacacacacacacagcgcccatcatatttgaggcatttcttctgtctgccttctagctctcagtccccactgcaatcagaggctcttctttcttttcttcaatcttgtaaaactttcttggccccaggttgggaatcagatccaaccagaatacactattcaaaagtatctgtccccttagtcagaggttttcctgcaaaagcgatctctttttttccttacattcagtgtatgctgctcaaattgctcacctgggttctgactgcttcactgccaggcaggtatatgaattcctgaccccatgctgcttcttccaccttaattatgccaccacttgtggtttagtcctcattctgttttatttctgtcactatagttattttttgcaggatattacatacttagctgtcatgttcatgtatgtgatattcaagtcactatctccaatccaaatatttggtgatctactttactttttcagctgtttcccaaacacatattcttgggtgtggcattatcaccccaaatctgacttctctagagtccaaccatcattttccttggcatcttctttttctatgactgacctcagtgtacttccagatttctagattcaaaaccttgaaacctgtgttgccttcccacataccacatacattaccctttcattgtagtcttagtcactaaattttgtctgtttcttattacatcgtcttttccatctattcctttcttttcattacctttcagggctaggcctttcaatagctcattgaactcctggaactagccacctaacttctctctttgcccacagtcttgctttcctccggttcttcctacaccctgctgt

SEQ ID NO: 139367 - DNA, 1051 bp, Homo sapiens
aatgaaacatgctaaagtgacattgagtacaaatgtttctgaacattttagcttagaatgatgatactcaattctgccattggataccagttacccaaggtgtcacaaacttttcagaacctcattgtttgaaatttgctttaataagtaaaattatgcccgagacaacactcagaatgagtaggggatgtatatgaaagtcaaccgtgataaggtgtcaggactctagaattgctgtgaattataaaaatattctctttaataagccttcctgtagaatctttgtcaggagttttagaagatcacaaggtttcttttgtgttcccaggctacaagatcaagctgcagagaccattgaagctctgcatgcagcaggcctgaaagtctgggtgctcactggggacaagatggagacagctaaatccacatgctatgcctgccgccttttccagaccaacactgagctcttagaactaaccacaaaaaccattgaagaaagtgaaaggaaagaagatcgattacatgaattattgatagaatatcgcaagaaattgctgcatgagtttcctaaaagtactagaagctttaaaaagtaagaaagtacatcagtttcttatatttagacattggtgtagatgtaaatcacagctgcatatacaaaaggcttcattttctgtaatgcatgattttctgtttgcaggtgttttatccttataagttaaaatcgtccctgaggacttgaataatggcccatctgagattatttggcactttccaccttttcttttaacttaagagaaaactgcacatttcggaaggtttagaaaaatagctcaatttttaaatgtttagagtctaggtattcaatgttgatattctggcctggtccatgttaagaaaaaaatattcctttcacagtctcttaaattgaatgtaataaaatcaatctttatgacaattttcatgcattttgaggttctggagccattttctgtgcatttttataccccagagctccaaatggaatcaaatacttgttaacgtggccact

SEQ ID NO: 139368 - DNA, 1058 bp, Homo sapiens
aagcagagaaatgttgaaaatgactatgtttattggatttctgtttaaatgacagtttaaatacattttagcttatttttgtggtctatgttttgtatttggggatttgataatattacttttttttatcttaatataaaacattttcctggagcaagtttcaggtcagaatttgcagccttaaaagacttttcaacaacctttgttaaaagaactgttacttcctttttctgaacctaattgaatgttaccttttcagttgtaatttcttcattttttcagactaaatatgtgtcagaatttctcttgtccatatggctaaagcaagagtatttacagagtgtgtttttttttttttccaactattattagaataactacagatctcctactttactcctaggatgggtatcggacactctgtgtagccttcaaagaaattgctccagatgattatgaaagaattaacagacagctcatagaggcaaaaatggccttacaagacagagaagaaaaaatggaaaaagttttcgatgatattgagacaaacatgaatttaattggagccactgcagttgaagacaagtaactagaaaatgatactcttattattttaatgaccagtgttttgggtgtgatctgccccagattagtaatttaatctcgaagtttgaaatctttagttttattgtttaagtggacttaaagatttatttattatagcaagtatgaaaaattacaccagattttgagctgttagtaggaatgatttttttttaattttttaattaatttttttttttttgagacagagtctcgctctgtcgcccaggctggagtgcagtggcgcggtcttggctcactgccagctccacctcccaggttcacgccgttctcctgccccagcctccagggtagctgggactacaggtgcccaccaccacgcccggctaatttttttgtatttttagtagagatggggtttcactgtgttagccaggatggtttcgatctcctgacctcgtgatctgtccgcctcagcctcccaaagtgctagg

SEQ ID NO: 139369 - DNA, 1008 bp, Homo sapiens
ttccctgtaagtgcctttattacagtatttgagaaactagaagggtagttatctcattatgctctgtctcccttatcatatggtgacccgcataagggaagggactcaggcagattcacctctattccccagcacctagcactgtgcctggcactccatacataaatgctgctaaaataattggcagagtgggactgtttctagacccctccaaatatggcttggtgggacagctctttatcttccatttttatgtggtcattctccttaccattttaagtaatatactgaggggctataaataccccttaactaacactggtgtcctctgacagcatgttctatgttcagagaaattctgagacaaaggaaagtaccagttgtgcacacaaccagtgctatctgttgatttaagatgtttaaatatcttaacatatttctgttgtgctttatttttctcagtatattctaggttttttactttgctcatttctcttaaagatatgaacttcttcacaccttaaactttgatgctgtccggcgacgtatgagtgtaattgtgaagactcaagaaggtacatgtctgaaaagcttgaatttttctctttgttgatttgtaggcttattggttgattcactctttcaggaaagagaatcatttcatgtagtagtgtaggattagtgaaagtcatgcaaagcagtagcttttgcatatgctttcatgtatttttttaagcacagatgttctgtttaccaaattgttagtgacagaacccttgttatgacagggtgtgccttttcttggtagcagaaccatatccctctgccttgggtgttcgaacaggaactgaaaggatgacttttatatggttcagggtactgaccagtctaccagtaatgtttacatgcagccacccagcatagttggatggtttgggattactagcagcagaatccttgagtatagggagttgcttgttatccctcactgaccttcctggttcccct

SEQ ID NO: 139370 - DNA, 2111 bp, Homo sapiens
cataattttttgtgctttgtcttttaaaatgtaagctcctccaagaatgatgtctgttcaaatgattaaagtctcaggagtgtctaggcattaaattaaccagagtctccctacacttgagctattgctagattgtgaattagatactgaatgaagttttttaggccatgaagaagtcactgctttggcttaggtggtgccacaataaccttaatgagttaacacagcctatagggtatgctagctgagaaccaggaactcttattaggtactaggagaatatatagcagatttgagtgttaagaatttatacgtatctgctactaagtttgttagaagttacaacattctctcacattaatatattttctccgttcactgcctagttaccgggtgatcaaattaaaaataataatcattattttgttgctgttccacagaatcgagaagagctgtttctacgtgccttgtgtttatgtcatactgtagaaatcaaaacaaacgatgctgttgatggagctacagaatcagctgaattaacctatatctcctcttcaccagatgaaatagctttggtgaaaggagctaaaaggtaaagtatactttcttatacttctcctaagaaagtgaaatcacaggaggacagaagttatttgtttttttccgtttgcttcagtgaccttagcacatacatctcctattatttaataaaaaacacaactgctttagccaaaaatttgtggaaaattcccacacctaaccagttaagactaaaaagaaaatagttacaggtaggtattacttgccttactatttatgcatgccagccagaagtctgaatgttcatactatgttttgcaaataacataacagtggccactttttgtacaacacatgttatttctgaggtgctcccagcaattttgacatcatttgagaaccgaaagtccagttttacccatgaggttcaagataattaagtggctcaaaggtcacccagtgtgttagccgtagaatcagaaacccaaattgtctctcccttggttacaataattgtggctgggcattgactttctctgttatcaacttatccaggaaaagaaagtacagttatatgttgagatcatatgaaagagaagaaaagcataaacaagcatgagttaccccattgaaagtaatcattctagaccaggtgcggtggctcacgcctgtaatcccagcactttgggaggccaaggcgggtggatcacctgaggtcaggagttcaagaccagcctggccaacatggtgaaactctgtctctactaaaaatacaaaaatcagccgggtgtggtgacacacacctgtaatctcagctactcaggaggttgaggcaggagaatcgcttgaaactgggaggtgaaggttgcagtgagccgagatcgcgccactgcactccagcctgggcaacagagcgagactctgtctcaaaaaaaataataataaaaaaattaatcattctttagagatacacaaggtcttttttattgtttttgataggtacgggttcacatttttaggaaatcgaaatggatatatgagagtagagaaccaaagaaaagaaatagaagagtaagtagctctgtgtttgatgtttgtcatttcttaaccccatagtcaaatttaagtggattcaggcagggcagcaaaggaaatgatgccactaaaaatacaggaccctgctctcccagttcagagttttatgtaaatatagttggggtagaagccatgttacatagaattgcagaaactggagtttgaggtggaaattccaatctggttcacatctgggtccagtagccagaatgagagtttgcctggaatgtttctcaaatttagatgccatttcaggtctctaacacatgctacaggaaaaatcagtgaatatatgtgaaaccttctgctatctagtgtccaagcaatcactctgggattgcaagcccaggcaataaaggcagctttgctgtaaaccagaagccttgtttggttcggaatgttcaggtgtgagcctcggggcaagtactctgatgctccagtgtcttcacatttcctcttttgccacaaagacccta

SEQ ID NO: 139371 - DNA, 1050 bp, Homo sapiens
ttcactaaaaacagataagatgcccgggtcaggttccatttgatgagactcttacctctttcagatcttcatttcagcagattccatattacctatgggaatgcagtcttcttatcatctagactatgttaatactgcagaaagtaaagtagagctttgggtaatgatctagtaaatttgatgagtgaaaagaagctgcagtcttccttttagtcaccactcctttctcccaccaaaccttgcatttctagctgtggttgtcatttagtcaaatcaagttaatagccagaccatcacttcaattaatacagtgtataagcaacttgccattgttatcagtttgcatgtatagaaacgacctaaatgaaagtgcaaagaagtcttgaaatggtttcttaggccatttagtattcagtaaaccagtacacacaaaattaagtgtaacctgttttttctttgttgagtcaaatttaagatctgtgtaactttttatgttactaaaggcaatgtcatttaattcctgttcataccattgcaagcatttgcttaacctcttttaatgtgacccacactgggattaagaatagaaagatatgtttagaacagtgcttgacatgagaaacaaaaggaagtagactgctcagctcagttggaaaataatgcagtcttttatgattagacatcaatcttttagacaaccaaatgattgtaatccatattgaaaaacccgtggggctactcttctttgtgtcgccttcccatcttgcggctctgcctaatggtggaactttatagtgtgagtatatattctgattccaataatttaagccagtagctgttattcaccttttactgtctgggatgtgtgtgtgtgctaggtattattatgaagtaaacaagaaaccctcaagtttttaaaaatatcactggggagacacacacatcagacctaactatagcaatgtgatcataatcaatcagaaaagatgtggggcagtgcaaagagtctggtgttctttgattttggtgaagtcaacatcagtgacagtc

SEQ ID NO: 139372 - DNA, 1751 bp, Homo sapiens
ccctctaccccaaacatttaggattcagggaaatggagacaagatactctttctataagggttgagtaagtaatggtgtgtgtatgtgtgcatgtgtgtacctctcctgtcactttacaggaaccttaataaggtgtgttcagctagtcagccattgcacttgggggagcattggtggtcaataaacagttcatggccagcttttccattttgccacttgaaagtaatgctgcagctatgataactgaggttaatacacaaaggcttgtgctgtagttacgcgtcgtacacagaaaaagctttagatgactcagtagtttaattcatatctgactgatgtctttggttttaaaatccatgctatcttatttttcagatctattaatgctttcctgattgtatatttatttatcttactgaccaaagctgcagtatgcactactctaaagtatgtttggcaaagtaccccatacaatgatgaaccttggtataaccaaaagactcagaaagagcgagagaccttgaaggtaatttgttttctgctgaaaattgaaactattttttgtgactgagccaaccttcactgaaatgctgctcagggaaacggcaccttttgttagcttctgaattttctctcgattacatggtggctctaagccaataaatatttaagaagatttattgtaaaagaaagaaaaagaaaaacaaagttttttttgtaaaaaaaacttttattttctttattgtaaaagaaagaaaaagaaaagaaaaaaagagttttttttcttttactttaggcatctatgcttgtttttagctctttatataagaatttaaggtgaaacaatttggcaagatgctttgacattttaatgtaataggagtatgtgaaatgtcacgataaaagcataatgaatgccttacatatgaactttgatctcacattcctatcttagggtggagtgagcaaagagaacttaaagaagtgaaaaagtactgacagaagtagtatatactgaagaataatgataaaattgagagtgttcttaaatgttctcacatactgtgataattttgactacagtgatgtagtgttattaggaagttccatctttatagcaagagcagtgttttcagcattgaaataaagatgaaattaattcttcctttatattatattggtctgatgaaattgtatgtctaattagcatgaactatctcttttattttaggttttaaaaatgttcaccgacttcctatcatttatggttctattcaactttatcattcctgtctccatgtacgtcacagtagaaatgcagaaattcttgggctccttcttcatctcatgggataaggacttttatgatgaagaaattaatgaaggagccctggttaacacatcagaccttaatgaagaacttggtcaggttagagcattgttttacttaaaataatttgtcaacgtagtgaaaatatctttttgtgtagtctggattaccaatatatgtgaccatgtcacatttggaaaagtgattcagagaaaattctttaatgcaggcatgtaatgaaggtaagcagtgttttcatagttacagcatcagttcttttgctggcatttttgagaaggatacaatttatgtattaaatttgaacgttactgaaattctccttggaactgggtgatgttacattattagctattgctttggaacaggaaacagtcttcatcaccatctataaccatttgt

SEQ ID NO: 139373 - DNA, 1040 bp, Homo sapiens
gtgtgtgtcagggcaaaatctgtccccagagttgttgatgctattggcttgtttggataagctgtgttcattttttatttaggtctttgggacctgaaaatctcttgctgaaaggagctacgctaaaaaataccgagaagatatatggtgaacaatttttaagatacacctatcaaaaaatatgctttgtaaaggctgtgaataaatagtgcatattaaaaagtaaacatggcaggtttgccatttaatttaaacctacatttaggtgttgggaatttataacgtggtaaactaagacgaaatatgacaaatactatatataattaaaattatcctataaatgatatacaactggtgagtggaagagggcctagatttcccacttttatagacttaaaaattcatagagccagctgggtgaggagttggttgacaagttcttagtttttattatattctgtaatttcttaggagttgctgtttacactggaatggaaaccaaaatggctttgaactaccaagggaaatctcagaaacgttctgctgttgaaaagttagtatgcgccacaatttatttagtcattattgattaaaatagttactttcttggtaattccaagtaacaagcataacaaaaaacaacatcaattataatagcaactacaattttaagcacttgtttatgtaccagaaactgtgctcaatgatttgtatgtctgatttggtttagtcctctgaagaacactgtgaagtaattcatgttaacctctccactttacagatgaggaaatggtcttggagatggtatgtgacttacctaagctcacatagctattaaagggcagagtttacttgaactgtaaattcattcctttttgctagtggagttaatggtttggagtcctttagttgctatatgcaagttggttctataatatagataatagtctcctggcacctattgaagcagtgcctcgtagatcctcaagccagttgccactgctatagacctcaccctgtatttggcatggataaccagt

SEQ ID NO: 139374 - DNA, 1043 bp, Homo sapiens
aggtgtgaaccactgtgcctggccatccaaataatttattgtctgccttgtaccaggcactgtgttgagtgttgggaaaattgtaaacaatacaggtgaacaacctgctcctatagaactctttgcttatcaagggagaaactttaatttaaaatgtacacatatataactcactataataagtgttatcaagtaagtatatatagggtgacatgagaacacataacaaggaacctaatttagattgggtcagagaaagcaaaggtatgagactagatggttattgtaatgcgtagaatgaaagcttcatttctgaaaaaggttttcatatacagtgcctctaaatatatgcttatgtatatgtgtgagatttcagtttcaaagtgttggacatactaaatatcactttatatgataatgtggacccataatcagtcattactattaagatttttcaagttttcttcataacagtgttcttttttcttcctcccttacagtatacactttggaattttctcccaaagaatctgtttgaacagtttagaagaattgcaaatttttattttctcataatcttccttgtacaggtaagagctccttaaacagccacttaacttttagaaacttgattgctttaaacgaattttcaatctatttctaaccttaaaatgccatgtaattaaaaaaagacattccagagcttattatgacttcttaaagtagaaacataacatttaaagattatcattttgtaaatttctaaagttgtgtttttactagaaaacctgttgagattttgtttcattgttactttctttgaaattttcatggatatcatatttttgctcatcccaggatgacgtgtattgtgtaccattaaatgaaatggaatatatcaaaactgaaaatagttcaaactagtagttttattttgttacataccagtttcagcctaattggaaacttctcactcatcttcctgattaccatttttgctctctctcattcatttactcactgtaagggtgagagcctagtta

SEQ ID NO: 139375 - DNA, 1753 bp, Homo sapiens
gtgatttttaatttttaaacgaagaaataattttccacataccatctacataagatgcacaaattcagactggagtactttcagacattgtagataattggaagactacaagttctaagtagtcttgcttaaaatgattactttgagggtgggatttatacctttgacctttaaatagatcactgaaaggaaggaaaatctttgtgactacatatattaaaacattttaggttggggaattatagttctaaaaaataatgggaatatataaatgggtatttgtttctgtcatgcatcctttgacttatatatgtggtagtctcagatatggtaatatagtaccatacaaggagactgtcccaaatttatataagaaaagggtattatcctgattaaagtgaagagagtgaggccttagcaaaattaaagggtgggataaaatagagcccaatcttgaaacttttaggttcggtgagtctacttattaaaaatgtaaaaggggcatgagaaatatattgtgtgaattggaactttacaacaatgaggctctgagagattgcaaaataaactatcctgtaaagccaaataactagtttctttttagaaaaagtcgatcatttcttcaatagaggcagccattctatttctgacctttacacttatacacaattattttgtgtttagaagtaatctgcattatgctttctgttctctagtaaggtagttgaaaggttgtcctcagtagttgcataataaatgaaatattcccagtccattctttcgtgagttagtgtgttgctagtgaaggttatggttaagattcatttgggctgtggatgaaagaaaaatgattggcagtaaaaatattgtttctctagggtactttctttaatcattttagaattgcactgttgacctcagaacagttggttcaaacagcacttttactaatctttactatgtcagcaagtaagagcttaatggattttgaattccctaacaaggttttctcctctccctactactttctcgccagattatggcccagcatgcttggacaagaattatgggcttggtagaagtgtggacaaatgtgatgaaaaactgaattttttcccttttctcttggtcagtgtgctggagaagagaaacgagttggcacacgcacagtgtttgttggcaatcatccagtttcggaaacagaagcttacattgcacaaagattttgtgataatagaatagtctcatctaaggtaagtttttgttttaactcaatagatgttcatatagtgaatcagataatgcattctaatttgtgcttctgaggaaactgatgcatttatgtatgtgtacatgtatttgcatgtatatggatcatataccagctataataagtattcctctgaaagacagtttatttaaaaaatcactttgtcttgttataggtgaaagatcattcacttgccttccgttatgattcacagtgcttgttgattatgcatattactttaaaccgtaaagtttgctaaaaatacaaattacttacttgtgcaaagcttcctgaattacccttgaatggatgaactaggatataaaagaatgcaaattcttttataaaagaatttgcattcttttggagaatgctgtcctggaatgactttatttgcatttctttctagttcccctgccaacccctccacctcccatcccacttctcaagtattaatagactcctacgtcccaaagggtgcat

SEQ ID NO: 139376 - DNA, 1199 bp, Homo sapiens
tgagatatctaaatagtgagaaaagtcttccatccctaagggacctttccacataaaccatctgcttaggcctttgttgcatatatttttgaagcttgaatttactgtattacagtgactcttagggtggagaaactgtatcatagtgaatacttagattatgtctcttcctcttaaactacaactaaaagttcaattcaactttcctccgaagcttattgtttagccccactttttattgtggtccatttattgtaggcagggattagaaaagaacttcccaagatgaggaaaaattactgtgtggtgtaagatactgatatttaaaataataacaccttaaaatacagaagttacaaaggcaaatcaggtctttggagaagaataacaaaaagatatgaaatggtgcaataatggggctaaggccgccagagtactgctttgagctcttaaggaatagactgtcatctgatgcttcctttgctgcctcccatggaagtacaggaactaggcaagccataattggctcacttcccaagttctgggaaactttacaaggatcacaggggttggtacaagttgcttgataatctgcagcattctctctgagatttagctgccattgtgttgccaaatttctgcatgtcagtatgcagatggtcccatctctccctccagcctctgaggtttgtaatctatatttatttctcctcttttcagccaggttgggttttgaggtcttggggcctgctttattcctgctttttatttgcatgtatatttttatccatttcctgagggtaatcgtaaatggttagctggattttcagcctcactgctcctatctttaagagttaagaatctccttatttagagttttaaattttgttaagtgtttggaatgaaaggctgtgtgtagagatgggtagggtgaaagtgaaagggaacttctgaggttttgtatacttgctggttaagtttctgtgcatattgtcaggctttgggttaggaaagattctgttaataagggaagttgagttgctgagaccccaaaggaacactgagagtcgcaggttacttcctataaatggaagaacctgaatcattaaaagataaaattcctgttagaatcttgaatcacagaatgtttacagtatttttgatccatcaactttctattagcaatcctttaatgaagc

SEQ ID NO: 139377 - DNA, 1124 bp, Homo sapiens
agaagtgttatctagttagcgtggcatagttcatttacaaaactattcatggtcattttgattttataaggtttctctctgtttctgtttcgcaaagactgtatatatgttttttagttaaacaaagttaatgttaatttctttcatttgtgctccctgagtttcaagtgtaataaccctgcagatatatttcacctatttgtattagaattatatttttttccatggacatcagttttttttttttttctttgtcagaagcaactagttattggcagcaaaggaatttattattccattgtgctatataacacaactaacaattttttttcagtatttacaatatgaaggcactgtttcataattgctttataagttgtcatcaacataatcaccccctttgagactggtgggaaaactgagacatcacatggttaaggagcttgccccaggttacataactaataagtggcagaaccaatatttgaacccagatatctggctgtagaactgatacacatagccagtatgcttctgttcttcatcatcccttgtacaggctctttgaaacaacctggtaattgccatgctctatgaaaaaaggccattaaaattgcaaatattggagtacctctgatttttgagcatcaaaaatatacccatcagaagatattcatgagacagttaaacattgaggctccaaccttgtttatactatattttcatctctggtcatacataacttgatgacccttggtgatctcaaatgactctaaatgatactctgattttggggctaggcctgtttaatcaaatgagtgagccatatctgtttgtaattcttccatccatccatctttccatctgtccatctatagaattcttcatctgcacgtaacagacacttaggtgttacttatccttactgcagaagaagtcctgttgtatcctaagagaataagacacagcttcaagaatcactggctgatcaccttgaggggaagccagtttgtaagggttcgccaattttatgtatctgcagccttccatatgttacagggactcttaattaagctgctgaatttggcattagttgaactttcagtttactttcaaggagagtc

SEQ ID NO: 139378 - DNA, 1048 bp, Homo sapiens
gggaaagtgtagatgaggactggtaagggctttgagaaactgagggtagagtcaaaagagtagtggtctttagctgagtgcagtgctacatgcctgtaggcccagctactcaggaggctgaaatgggaagatcacttgagcccaggtgttcaaggctgcattgcacatgattatgcctgtgaatagccactgcactccaacctgggcaacatagtgagacccctgtctcttaaaaaaaaaaaacaaaaaagagagtagaggtcttaaagagctatgtagtagaagttatggagctgaaaaatgagagagggctattatgtgtcagggatgaagtaatatgtgataacagatcctactctctcactatagaagaggtaggtaaaaaagagtggaggtgaagatccttaaagcaaaggagttttgggactcagcaatctaggtttctggattggggtgggtgttgcatgtggatgatagaattttcaagtaccatggcaagtgttggcatagagaacaagtttgaaagccaaatttcaaactcttcagccaatgggcaataagtgaccagagaccggtgtttgatagtgatgacaacggatggtaaaggtcactacagataagaagtctgagaactataagatggtgtgttcagatttcatcagatgatggcaggagatgagatggagaggccaccagtgacccaaatgaatgaaggcacacgtccaaggagatggatagatgaccatgatgaggatgggtaaaagctggtatctccagatgatatcaaactaaaggaatgatgccatgagtatggagtaatagactctataagcaagggggaggcaagaggaagcttgcttattgccctctgagttacatagttaagaggttcacagggggaagaattttaagaagacagccaagtttcaaggaatgtgggtggttgtaaggtagggtttctgatgttaagatatagagagtttgattaacaaggatggcaggttctataggacgtagttttttttttttttttgagataggttcttgc

SEQ ID NO: 139379 - DNA, 1068 bp, Homo sapiens
agtaaagtactaataccagtgcttcctcatgtatactcggttgagtttcttttgggggtgatgaaagtgttttagagttagattgtggtgatggttgcacaatgctgtgaatatgttaaaaaccatggtattattaaatgagtgaattttcatttagtatgtgatttattaataaagctgttttatgaaaagggtactcatatcactatgaatcagctctatcacttagtagctggctgtgtaataaccttggattaagttgctttcatttttttgtgccttggcttcctcatctgtacaatggggataataatatcttttttgttggttggttgtgaggactaaatgaataaatacatgcaaagagcttagaattgttttttgaaacataaaccctcaaacgtcagtggttgttattattcttatattgcatgtatagttcagaagagaagtctggggctgtagatacacctttttggtgtgatcaacataaagatggtaattaaagccacacatgtggattaggaaacccagggagaacatgtagaatgatgaaggacagagagctgagagccaaatctagagaaatagcatcatttaatatgggagcaggacaagcatatctggcaaaggaaactgagaagtcatgtccatagaggtgagacaggtgtagtgttagggaaggaaaggaaaaaattgtcttccaagaaggagaatatggctaatagtgtcttgctaaagagagtttatcttagtctaatttgtgttgctctaacagactgggtagttcataatgaaaataaattgatttcttaccgttctcaaaggccgggaagcccaaggttgaagggcctgcatctgccgaggtccttcttgctgagttgccccatggcagaaggtggaagggcaagaaagtttgagagagcaagagggcaagagcaggagggagccaaattaatttttataacaacccactctaacaataatctattcatgagggcagagcccttatggcctaatcacctcttaccatcctggtcccacctcttaataccatcatagtggcaa

SEQ ID NO: 139380 - DNA, 1012 bp, Homo sapiens
gtaaaatgttcctagtttctactctaactctggagcagtatttgtatgtgtcatcaattgtttaaatttgaatcaagcatcagtaatggcataccatttgggctgctttgtggccctgatgaatgctattttattttatttattttttattttattttaattttgaggcagagtctccctctgtcatccaggctggagtgcagtggcccagtctcggctcactgcaacctcctccccctgggttcaagtgattctccttccttagcctcccaagtagctgggactacaggtgcgtgccaccacacccagctgatttttgtatttttagtagagattgggtttcgccatgttggccaggctggtctcgaactcctgacctcaagtgatctgcccacctgggcttcccaaagttctgggattacaggtgtgagccaccacacctggcctgtgaatgctattttaatatagttctcaggaatgattaaaaacaaatgtgtttttctaagtggtagaattaatagataaaatcactttgaaattaaagtcctcaggtaacatagaattcttttccctgaacaagtcattatgtagcacatggtataattttggcagacccaactttattaccaacaaaactgtaaagcgagtcctatgtcctgtttgtcttttcttctcgggggtttctgttcttactagaacaaatcaaagtacagtgtgtgttgctggtcttcaagaattattagtttttgttgtaactgtttaatgcagaaacagatgctagagcagttattccccaaggcaccatgtgcctaaggcatttttaaagcactagtatgttttcagtgtgatactgctactctggaagaactgtatacatagtggttcacttttccagtgtggttagaactgacatttctaagatataaagaaatttaaggccaatttggatttgtactctggctctgcttcctgcttaggtggaagactttgagtgatttagttatgctctctg

SEQ ID NO: 139381 - DNA, 1054 bp, Homo sapiens
actcataaatctggtttttctgtattccctttctaggtgataatgtccccatttactctgtcatttaagcaatacacctctaagtcttttcagttctttttttaatctctcttaactccttctcctcttccattctcatggctgcagctttggtccaggccctcaacagttatcacctaggtaaatacagtcatatgtgccccagtgtagcttgtccagccttgcctcttgctatctttttcctcatatgtttttcttcagcaataggtgaactccttgtgggtcactcagtcaccccattccatctcctgcccttgggcctttgcgcatgctagctgctctgccagatcctccctcttacttcttagcctgtttaacccctactcatctttgaaaggcttgcttcaggcatcacatctaggaagtctctgctgacccctgagtttgggcttaggcactctttttcctcacacttgcctgtagctcctctgatgttatattcaccacactgggttataatgatctatttgggtgcctgtcttctcttctggattgtgaattcttggagactgcagccatggggaaatctattgcatttttctgtgtgtgaatgggagtggggtctctcctttagtcataatgtgtccttctcagggaggccttcctttgtaaccctatctaaaattgcaacctcccccaacacttcctatcccccttccttgatttattgttctccttggcacttattgctgtctaccatactatagattttacttatcttgtttattgtctgtctcctcccactagaatgtaagcgctatgagggaagggatttttgtctttttttaaactgttgtgttctcactgcctaaatcataccaggtatgtagtaggcacttagtgaatatttgttgaacgattcaacaaattcagctgcctctgatagtaaattttgttttgttttgtttttgaagacagggtcttgctctgtcgcttagtctggagtgcagtagtgcaaacacagctctctgcagcttcaaactcccaggctcga

SEQ ID NO: 139382 - DNA, 1058 bp, Homo sapiens
tgcctcccaggttcaagcaattctctgcctcagcctcttaagtagctgctattacaggcacccaccaccactcctggctaatttttgtatttttagtagagacctgtttttgccatgttggccaggctggtctccaactcctggcctcaaatgatccgcctgcctcagcctcccaaagtgctgggattacaggcgtgaacccccatgcctggcccatcttaaccatgtttaagtgtactgttctgtggcattaactgcattcacactattgtgcaaccatcacaactctccatctctagaactcttgtcatcttgcaaaacaaattctgtattcattaaacaataaacttcccgttttcttttctccccagcccctggcaaccactgttctactttttgtctctatgacaaagccaatcaatttttgtgttaagtgtataccattaatctctacagccagtagctttctattgaattttttagataaaaaaatttacaagtcaaaccaggatttataaacatatactcagtattgaaacaagaagccatagacattttaaatagaatttagcatgtctttaaaaatgtgtaattgtatcttttaaaggacttgaagtctgctccactatgtaatacaactagattaatatttgataacttacacataagaaagctgcactgaaaggaaaaacaagccctattgctgggtggttcctttatgcttgagaaagcagtttctttggaaaataaatacatttgtgatcacatgaattaatgcaaattgctgcatcaggctaaaaatccattatgctcagtaactttaatgagattgtacattttgggatgctttggacagagcaaagcaatacatattaaaagggctgattttgaaagctgaagccccacttttcctcctgtcaattttttttaagttgaattgcctacaggttactaatatttagaaagctgatttgcgaagctggaaaccatcattctgagcaaactatcgcaaggacagaaaaccaaacaccacatgttctcactcataggtgggaatt

SEQ ID NO: 139383 - DNA, 1037 bp, Homo sapiens
gtctcagctaatggctcatatgtatttagtattcagtgcagctgaactgtaattctgtaatggaatttgaccaattttgagaagccagtttgtaatgtatgaattagtggagacccatacatcttgacgtttgctgactctgccagatgttggttatatttctgatggaaagaaacagagagctggctgggatcccaaatcttagaattgctaccggccgcctaccactgccacatgttgcagtggtaggagataaacatgctgaggataagacctgaaaaaaaatcactctatatcagcaactggagatacagcccatactccttatgaaatattctactctcgtggcctgggttgaaccatgtatgaggcaggcactccttttagcccaggcccaagtctgctctatgcagtcttcctcatatcttgtttccctagagttaccacttgaaggcattccttattcgtaatgtggtgatgattaatggcacctacctcatgggcttgctgtgaggtttcaatcagataatggatgctgaaggcttagactgtgcctggcatagagtaagtgctcaataaatggtagctagagttcttttattatgcaatagaagcaggactctgagggtaacatcttaatatttccagttgaatgttatcaaagtcagttgttcatgcatttgttaaattatgggccatagcaacccaactctatggacctgggctgctgtgtcccagactgtaattaacacacagttgcttatatctgtcttttcttccaagtgaggacagtttgttatgacttgtagattaagcaaaattacttgcttctccattgtgtgctaacctggtgtagaataccttttcttgtctgtcttatttaccatctctcttactttcaaatttctattataattctcctttagattacatatagctaacttaagaaagtcccagatgtgaaaataaggcgagtgcatgatgtatcccccttcccttgatttttgctgatcaggtggggaatctgacccaatagc

SEQ ID NO: 139384 - DNA, 1167 bp, Homo sapiens
tttgtaaatgaaaataatctggttttagaagatggcaaaggagacttagaatgatttctatagttgtttgtttagttcttttgacaaaattgcctaaagttcttttataaaaatggaattcattttgtctacttttcactccttctcaagtcaaaataacacaaggtatttactaaatcagtttgcaaatttggaaaattttaaaaagtactgctgagctgggtgcagtgactcacgcttgtaatcccagcactttgagaggcccaggagggaggattgcctgaggccaggagttcaagaccagcctgggcaacatagcaagacctcatcaaaataaaaaataaagtattcctgaatgctctggacttgcctactggtttggaagtggttatctcagtgtggaggattggagatgccgtttttattttacatggacaacagaccattgctagctaactttagtcccttagcccatgtagatctgacagtttatgacgtgagactgtcttctctaagtgacacaaaccatttcaggttgtttcagtaaggttattttgggtcttacaagcagggcccaagagcttctgtgtgtttcattagtcaagtcagggagatgagaatgagtctgagaaagggcatcagactatcagtgccttggactttgggagggctgttggctccaactctaccaatcaatagccttctgggaattggttcatatgattatttgatttcatagaagtactcttccagccaaaagtgctgcttgacacatgaaaattgtatcttgacaatttttggataataccacaccatcccttgatattgttgaaaatcagaattggtaatcagtatgctttccttctagccatgaagtctttaagtaaatatgttaaacttagagttttattgtagactttgtggttaattatgacctttcttagcaagctgatgtcacaatgtaataagtaagttatgtttctcatatttattcagaagtccaggatgtctttgtgttagggtgatatttaggttttgatatcttcgatttgtctattttccccaattgtatattcagtctgtaaaatttattttactcttttccaattacagtggccacatcttcttatttaattttcaccttactttgtacatcattttagggta

SEQ ID NO: 139385 - DNA, 1145 bp, Homo sapiens
attaaaatgaatattttagtgaatattctggagcacttagttggaacctaacgtatttgtgtaaatgctcctgtgtccacctgttgcccacatctactcatccccacgtctactcatcccccagcctccaagccttctctgtttgcctgtagctcctggaatctgattgcctcatagctaaaacctttatgaaaacatttgggtagagtagcccaggatttctttgcttggtaagaactcacttgctaaaatggtttttattaaaatatgtttgtgcttcactactgtgcttcttttgctagaatagatgcagccctaaagatttgcttgtcttcctaattcctttcttaatacctcatagtagtgactgagctattgatctgaagggataataacagccctacacgtgctttttgcaggttctgatatcttaagaactaaccgagagctttgaaaaagaacattgccttagtgacataaattcaagcctgcttcaaaccaaataatatacagcatgtgtcataaagaaggttcattcctagaaatcatcatattcaaaaggagcaaaggatgaggaagaaggaattacagcaagtgatagtacttgctcaaagactgttaaccagggtcagtgccatgggaacattgtctccagcagccccactcactctctacccaccccactcctaattcatatccctggctgctgctgctttttttttttttttgacacagggttttgctctgttgcccaggctggagtgcagtggcatgatcatagctcactgcagccttgacttccccgttcaagagatcctcccacctcagcctcctgagtagctgggactacagtcacgtgccaccacgcctggctaaatgtccctggcttctaacatgcacttaaagcacttctcagaaagactgtcccagtagaaaaggtgcacagaaagtaaacaattcactttttcttttttcttttttttttttttgagacagagtcttactctgttgcccaggctggaatgcagtggcgccatctcagctcactgcaacctcctcctcccaggttcaagtaattctcatgcctcagcttcctgagtagctgggattataggtgtgtgccaccatacccagctaatttttgt

SEQ ID NO: 139386 - DNA, 1053 bp, Homo sapiens
atttttagtagaaacggggtttcaccgtgttagccaggatggtctcgatctcctgacctcgtgatgtgccccgctcagcctcccaaagtgctgggattacaggtgtgagccaccgtgcccggccagcagcttcttttctatgaggccatccaccattccaggctgtgttggtcaattctgtctttcacagcatttgatttttaaagttccagccagcatgaaggaaagggagtccaggagaagcttctttaggaaggtgacagaaactttcacatattacttttgcgcacatgccattggagaaatcttagtcatgtggccctccctagccacaagggagacagggaaatgtagtttctggttggaaagtgaggtgttcaggaagaaaggaagaacagatttgggaggacaatccagtggacagggagacaggcagtaaacaacataattgtaatatctcctgtgatgagtgataaaggaaagataaagcagagaatgatgatagaaagtgtcaggggtgagggttgcagtttttcaaagggtgaagaaggcctcactgagaaggtgtcatttgaataaatccccaaatgaagttttgtgagcaagaaataccattttgggttgttatgaagcctataagaatgcatggttggttttaacatgcttgagtctaggaccttatcagaccccatcagaaagtagttagcgtggaaagacaccattgtgccacatattcacctactgcaagcaatacaaggccttaatgaatttttgttgttgttgttgttgtttgttttgtttttttttttgagacagagtctcactctgttgcccaggctggagtgcagtggtatgatctcggctcactgcaacctctgctccccgggttcaagtgattctcctgcctcagcctcctgagtagctgggattacaggtgcctgctacggcaccgggctaatttttgtatttttagtagagacggggttttaccatcttggccaggctggtcttgaactcctgacctcgtgatctacccgccttggcttcccaaag

SEQ ID NO: 139387 - DNA, 1019 bp, Homo sapiens
tatgtcctaggatcatgtgaagatgaatgaacaaatctaaagtgtctataggccaggaatggcagactctactataaataattgtagtttgctagacttcccatctgtaaaataaagggcttgggctgctagatggtctgtaaggctcagtgaatcctagaactattaaagaaccttagaggccatttagtagtccaacatcttcattatagctgggaaaatggactgagagagggtaagtggcttttccaagattattcagtgaattgagaattcagaaatatggaattccaggctcagttctattgcccttgtcttcagtttccttatctgtgaactgcatgggctcctgggatgatatatatctaagttatttcccagctttataattctgtactatgtgtttaggcttagagtctacgagtgagcgaatcttttgactattttctgttgggtttttatctgttttactctttgggtctccatctcttgattgcacatttgacggtattctaccccaaatttcagtttcccctttaatagtaatgagtttgaactgaattttatatactttggatgggaacattgacaaattttaggaagtactgtttcactcgcgtccgtgtgaagagatcaccaaacagacttcgtgtgagcaacaaggctgttcatttcacctgggtgcaggcgggctgagtccaaaaagagagtcaacgaagggagataggggtgggactgttttataggatttgggtaggtaaaggaaaattacagtcaaagggggttgttctctggccggtaggggcgggggacacaaggtgctcagtgggggagcttttgagccaggatgagccaggagaaggaatttcacaaggtaatgtcatcagttaaggcaggaacaggccatttaaatttcacttcttgtgtgattcttcagttacttcaggccatctggatgtatacctacaggtcacagggggatatgatggcttagcttgggctcagaggcctgacactgt

SEQ ID NO: 139388 - DNA, 1057 bp, Homo sapiens
ccacctggtctctcccttgacaggtgggtattatggggattataattcaagatgagatttgggtggggacacatatcaccctcataaccagttcatcacgacaccatgcttagtcagtgccacttttctttatcatcatgactgccaccctcgtctaagtcattagcatctctccactttcatatttgttcctcctccagttttcccgttcagtaaatggcaccatccccctcctagtagctcaagctaaaaacctagcagtcatacttaatactaacctttcccttcatcacatttgtcagagaatccagtaggttctatttctgaaaatgctgtcacatccatccacctttcttcatgcccacacctaccaccattcaagtttaagctactgctgtcatttacctggacctttgcaattgattattttattatccacctttgccctctcctatctgtcttccacacagctccagggggatcttttacagacgcacaccaggagcacttcattgactttcgactgatttctggttaaatactttgctggtattgctctctctctttcactttttttcattcacttttaaaaactgagataattcacctaacataaaattcaccactttaaagtatacacttaagtggatttaaatttcctatgctgtgtaactatcacagctatctaattccagcacatttccactacctcaaaaagaaaccccatccgttagctcttagtcccagtcctctatccttcagcccttggcaaccacccatctactttcttatctctggattgccagtggaatcatacaatatgtgttcctttgtgactgaattctttggtgtagcatagtaatattttcaagatttgttcatgttgtagcatgtatcagtatcagtacttaattcttttttttttttttttgaggtggagtctgtcacccaggctggagtgcagtggtatgatctcggctcactgcaacctgtgcctcctgggttcaagcgattctcatgcctcagcctccaaagtagcttggactacaggcacgca

SEQ ID NO: 139389 - DNA, 1051 bp, Homo sapiens
atcttcccatacatagatgctcttttctgaaacctatgactccagtaaatttatgtcatttaaaaaaaatgcatatatatatatatatatatatatatatatatatatatatatatatttagagaaggagagagagagagagacagtcttgctctgttgcccaggctggagtgcagtggcacaatctcggctcactgcaacctctgcctcctgggttcaagtgattctcctgcctcagcctcctgagtagctgagactacaggcgtgtgccaccacacctggctaatttttgtatttttaggagagacagggtttcaccatgttggccaggctggtcttgaactcctgacctcaagtgatccacctgactcagcctcccaaagtgctgggattactggcgtgagctgccatgcccggccttatttggtgcagagacagtaaggcagagaccaggatgaaatatatatttggggtaatatatcatgacactacttcatatattattataggactgcttacttagttaccctgcttaaattatgggtacacatttctggtaactttcactacacatgggagacaggatggcagttcattttcttgagtactagtggtcatttatttaaaaagctggagatcaggccttttttcaggagcacattccttaccaacacatttatagttcactgctattagataagaaagcttttgatagactttcagatctgactgcatcattcggacttaccagaacatgaattgcatctcattccctctgtattagtctattttcatactgctttaaagaactgcctgagattgggtaatttataaaggaaagaggtttaatggactcacagttccacatggctggggaggcctcaggaaacttccaatcatggcagaaggcaattaggacgcaagacaccctcacaaggtggcaggaaggagaagtgccgagtgaaggggggaagaggcccttatgaaaccgtcagatctcgtgagactcactcactatcacgagaacatggggaaaaccacccccatgatt

SEQ ID NO: 139390 - DNA, 1041 bp, Homo sapiens
ttgttccttttgtttatgcttattgctaataattcagccatttagtgagtaatattgagtgcctatataccaggtagtttccagtgttcctaattaacttttagctgaattgagatttgggcaggtgaagctggccatttttatattgatgcaactgttcaaaagagcttgttttttcaaaaagctgccagtttaccacctgctgagcagtgggttctaggaggtaaaggatggccagtggcccctgaaagaaccataactaaccttgctgtgtctgcatgatgtgcaaagaactagcccactgagtgaaatcaaatactggtttgttgagtgatggaaaaaatcaaggctcattgcttgtctaacatggttattcagttctctcaaagagggtgaatgcatgggatataaaaaaaaaatactatttttttcttcaaggtggtggaatttcctgtacatctgtagtgctttatacagatgaaccttttacatctggaaccctcgagactgggggagtttttctggttaggtggagggaggttctgggcttccacaaatgaattaggtgctggctctcgagtttatttcctttcacttaacatttaccttcttggcctggtataagggtagattagcggtgatcgtaaaacaaaacatactggcacaactgcagcatatgttaacactgctgcagcttaatgatgaatgagtgctcagcactgcagatatgggcacaggatgccctatgcccacacattggcagacagcccctcaattattgcagtgtatggacggattactgggtcggctgacttcttgataatagaagatgtgatttataaatgataatggaccgtggatttccagatttagaaggttaacctgtatttgtgaagtagaaatcattgatttcttgtgccatatgtatttaatggaatatgggaggattggtgatgttgatgatattgctgttcaagcagatatcatcatttgttttttagacgtctctattatatgttgtcataaagtattaatgtggca

SEQ ID NO: 139391 - DNA, 2430 bp, Homo sapiens
ctgagaatgcaagcgggtattgttcttaatagctgtttcacatagattcttgtgatcttggagtgttgcgtgggggtgacaaaaagggaaaggtggcaatgaaagctaattgtatttaggaaaaggataatcttttcacgtggcactcttatggtggaaaacaactgggctctgaatcataataaaatcattaaacttaagttgttgaaatcctttttttttttttttaaggatttgaacatttgaaaccgaacaactcaagtattggtctaaaagcccattgcttcccttttgcgaaaagtgatctgcatcgtatcagagtctagtaattaagcagtgctggcccaggaagccagggcatgcagtagaatttgcagcagttgttgaggtgccagcctgcaggtttgaggctagtactttgcatccccgaccaagatctcagcagagaatcacttttgctaatactgaaatgagctttgaccttattgttgcagctggaatattcagctgttcacattttcctgcgcagccatgactgtggtaagtatcaggaatttgtaccagtgcggtaagctggaaggttcttaggagttgtgtctgagccctaggcccagggcaaggaattaatctgcataccgttggactgaatgtgaaaattactatcaaataatcattgctaaaaaacggcttcaaaatttgggggaggggggcaatttttccatctcttagatcagtaaaccatgcgctgttctcctcttttgcctgacaaattctttgaggggtacttccatttgaattactagaagactagaattaaagatttgagtggaactttgagactttcacagcagtatagatgtagtcaaggttgtgagttgtcttatgattgttttaatattttagaaatagagctatgaattcctttcaaaatgagttgtttttttagtgtacctgtacgtgtctgatattggttttgattgtgaaataaattacagtggtgttgattgtagttgttggttattgaaaactagactacatattagagaagtgcttcctttatattttaaacctgacgtggaagaatcccttaggattcttacaagcatcatcttctatagctcagttgtgtttgctgaatcatttttgaaatgccatttatttttcgagttttccaatttcaagctaaaagaaaatagtgattcattgtatttttttaaatacatggtcttgacttctttgccattaataactgtgttcctttctttctgatgaattatgactttccttttgacagttttgaggtggaaagaaattggtggatttggtgtatagcattttagggttgaggcatgtagagggtgtcctaaaggatttaagagttggatgtctctgagtgcaataaaagcaccacctgttctcaagtcaacatctccataaatacagtaaataagtaataataactctgtctgtacaatttattttcttcaaaggcatatttaatcagaagtctggactagttgagatttaagggtcatggacttttatgttatcctgtcttgttttattcttaatgcaattcctagtgactatagtaacgtgttctcttgggtttaaagatttattgaaagtctaaaaacaattcccccctctttttggcttatgaaattattttatactaaagattcaaaataagagatttcttgataaagtaggttgggggcttggtcaagaggatgctgtcagtttagcttgtcagtgatagttaacaggtatgcatttctagacctttgatacatgaaagcttaattgtgagtgtgaaatactggagtacatttaaatctctgattctagaagcccttaaactgctttggtttcataaagcatgtagcatataatcataatatcacacagaagatgcccaggactaggaagaaattagactgcataaggaagaatggaaatttaaaataagactaaaaaatacaaaataagaattaatgaaataggtagctaatttattgctttgagtccaaggcaaggctagtctaatgaagcaatatatggaggcaattaagaaaatagttcaggtaattgctttgttttttccccaggagcaagaaggtttttagtttcccctttaaactatcagagtaattaaacatttttttttttctgtttcactttactaataatcctggcctgacattgacgagcgggaaaatattgattttattttactgtgtttagaaatatatctgtatgtatgtattgcaatatttttacatttgcacaactattacaaatggtctgtgtatctcggctcccacatggctgttcatagaggtctaggtttagcagttgaacttgaccatacttaaaagcaactttttttttttaaatcatattgtgttataattgccttttaacttg

SEQ ID NO: 139392 - DNA, 1052 bp, Homo sapiens
ccctttgtcagataagtagattgcaaaaattttctcccattctgtaggttgcctgttcactctgatgatagtttcttttgatgtgcagaaactctttagtttaattagatcccatttgtcaattatggcttttgttgccatcgaaaagcatactatcgatactgaacttgaattggaagaggcgagtctggtctcaaaatggaggtaaaaccaccgcccggtcgcccccagcccaactccggccgtcggctgtcgctgccagagggaggagggccatgatccaaaggaaccagagcagttgagaaaactgtttattggtggtctgagctttgaaactacagaagatagtttaaaagaacattttgagaaatgggacacactcacagattgtgtggtaatgagagaccgccaaacaaaacgttccaggggcttaggttttgtgacttattcttgtgttacagaggtagatgcagcaatgtgtgctcgaccacacaaggttgatgggcatgtagtggaaccaaaaagagctgtttctagagaggattctgtaaagcccggtgcccatctaacagtgaagaaaatttttgttggtggtattaaagaagatacagaagaatataatttgagagactactttgaaaagtatggcaagattgaaaccatagaagttatggaagacaggcagagtggaaaaaagagaggatttgcttttgtaacttttgatggtcacgatacagttgataaaattgttgttcagaaataccacactattaataggcataattgtgaagcaaaaaggccgtttctaaacaagaaatgcagtctgctggatcatagagaggtcgtggaggtgggtctggcaattttatgggttgcggaggaagctttggagatggtggaggtaattttggccttggtggaaactttggtggaagaggaggctatggtggtggaggtggtggcagcagaggtagttatgggggaggtgatggtggatataatagatttggaggtgatggtggcaactatggcagtggtcctggttgtagtag

SEQ ID NO: 139393 - DNA, 1361 bp, Homo sapiens
ttgcattaatcaatagctgcactttttgcaaactgtggctatgacagtcctgaacaagaagggtttcctgtttaagctgcagtaacttttctgactatggatcatcgttccttctgtggcagatttttacagttcctctaatgcatttgggacgactgtctcaaagtaacctgcagctttcctgacaactcctcgctctctctctcctgctaagaactgtagcccttttttgctgtttttagaaccttctgctaccatatccaccacttccaccaccagatccataaccaccaccatagggactgcccgagtgtcttccaccaaaactgccccctttcatgggtccataatttgattgctgttgtccactataatttccaaaatcactatagttcccaccaccaccatagttaccaccgccaaaatttcctccttcattgtaaccatcatatcctccaccacctccaccatacccaccaccttggtttccatatcctggtccaccaccgccatagccccctctactactacaaccaggaccactgccatagttgccaccatcacctccaaatctattatatccaccatcacctcccccataactacctctgctgccaccacctccaccaccatagcctcctcttccaccaaagtttccaccaaggccaaaattacctccaccatctccaaagcttcctccgcaacccataaaattgccagacccacctccacgacctctctatgatccagcagactgcatttcttgtttagaaacggcctttttgcttcacaattatgcctattaatagtgtggtatttctgaacaacaattttatcaactgtatcgtgaccatcaaaagttacaaaagcaaatcctctcttttttccactctgcctgtcttccataacttctatggtttcaatcttgccatacttttcaaagtagtctctcaaattatattcttctgtatcttctttaataccaccaacaaaaattttcttcactgttagatgggcaccgggctttacagaatcctctctagaaacagctctttttggttccactacatgcccatcaaccttgtgtggtcgagcacacattgctgcatctacctctgtaacacaagaataagtcacaaaacctaagcccctggaacgttttgtttggcggtctctcattaccacacaatctgtgagtgtgtcccatttctcaaaatgttcttttaaactatcttctgtagtttcaaagctcagaccaccaataaacagttttctcaactgctctggttcctttggatcatggccctcctccctctggcagcgacagccgacggccggagttgggctgggggcgaccgggc

SEQ ID NO: 139394 - DNA, 1043 bp, Homo sapiens
aaaaagaaagagaaatattttgtattttttaagtaaacttgtgatctattgttgatcaaccatattagcagtggaaagcatttactcagttcaaaagaaaggaaaaattaaatatatatttcttgctatgagtttctttttgggggaaggggaacaggaaacaattttaattgcttaattctgcttttctcaatataaaaatgacactcctctcattccctgggccttcatactggaagacactatttggtcatttcaaattcatcgtggacttctgacatattcttctaagttgctcaagtttaaacttttaaaatttaattcaatagttaatagtttaagagttttttttaaaagccatttttgaggttgatacagaaggaagtacagggctgcacagttatttgatatattcaggcccactctaacaacccattctaactgttcagacagaggcagatgtatttttttctctcagaattctttcagaatgacctcataattgggctgcccctgtaggctcagcattgaagaataatgagtttttgaaccgtgaggaggacatgttttgaaacagaagcaaatagtgcagattatttacaatgctgtcatcaagggaatctgtgctagaatggcttgaaatgctcctgggactgaagctgggtatggccattgcaaagagtccagagtggcaatggctggcttttcctaactcttcctgattccatttttccttcacatcagtaacacgctaattgttgaacagcagagaggccagcccaagctgattaacagtctggcttagtgacaatttagttgagttccatttcttctaaatgatccttcagttgttcagggaaaaaacaaagacacagggtaaggtatgtttgtgttaccttattgtaacgtacacataggggcatttctgtagccaaacacaggaagtattaaaactttagtaacctggtacctcctagactcttttcactcatatattccatgaaaagacatgcagatgctttctgacatttttactcagtgtc

SEQ ID NO: 139395 - DNA, 1225 bp, Homo sapiens
aagaacttttaattacattctgagatgggttagcattgaaaggttctgagcagaggagtggtatgatccgacaagaatggaaggaagggggagcattttagaggctactctattaatataggcaagagatgttagtggcttggaccgaagtcccaatgatagggctggggggacagagttacttttcagatataagttgaagacagagtcaatgtgatttttaatgggggtagatataagatgctaaaaaaaaaaaaaaaagataaaagtccaggataagtccaagatatttggtctgagcaactagataaacagtgattgtatttattgagatcagaacatttgaaggatgatcaagttttgggagatggggatctagaatgggttttagacatacttaaagatatctattcaagtggagatgttgagttgaagatacattcatgagtgtgaaatgtagggagtggtctttgctagagatgtaaatttaggagttctcagcatatacatttttgtgtgtgtgtttttgagacagagtcttgcccaggttggagcacaatggcacgatctcagttcactgcaacctccacctcccagtttcaagtgattctcctgcctcagccttctgagtagctgggattataggcacccaccaccaggccaggctaatttttgatcatgcacgtaatatttaaagccaagggactggagaagcaaatggacagggctgctaattaggcttttcttaacatcgccatcccccttccttttccctacttgtactatacctggccacagggataacttatcgcttggacatatttcatgtaccttttcaatgtgttctgctctactcttttgaccttcatatgacaaaaaacaaagggaatgtggtcagcatagagagtaggaattgaacacaggaaaaacaagcagccactttcatgagacgaattctggggtcctgagaaaaatctattactcccaatatgtggtagcttccttagctgctggcagaatcctctgatcattcctgccccaccccgctttttttttgagatggagttttgctcttgtagcccaggctgaagtgcaatggcgtagtcttggctcactgtaacctctgcctcctgggttcaagtgattctcctgcttcagcctcccgagtagctaggattacaggcatgcactaccacacctggctaattttgtgtttttagtagag

SEQ ID NO: 139396 - DNA, 1049 bp, Homo sapiens
agagattttcacctctcttgccctttaagcatcagccttcatagcaacatgcaccaataatgggatgctaaagatgaaagccattgtcatgaaatgcctgtagttggctaatggccactgcttgagagggtctgaatggctcaagcttctgattaacatgataggaaaacgtatcctactcattatagatttcatcaaatagttatccagttaggaagctcagaatgtcagtcacgtatcactgtttttctctgaatagccttaattataacatccagtttcactcctcacaaagcagatcacaagagcaaaggctgtcttacaccaggctcaagcctgtccaaattgtcatgttggaaattccctctttggagactttggcaaatggaaggtttccaaccagttagaaaggaaagaaggaactcctgcaccatgagatatcacaaccttagacaatgatgataactgtagtctgtaaaatgtggtcacatgtgagttgtccagacccagagtcaacatttctgtgctgagtgaaaccagactttctgttgaagggcagcccctgagaaggattccagctgcagttttccttgtagaggtctccaccctctagcatgaaggctatcaggtgttggctctacagttggacaatcacttgtctcaaaattcttcaacttggcaagagatattagtgaccttctgctgaccctacgcctacccttcaaactttagcttagtgcttctgacttggcataatgactaggaatgttgagaaagagacattgaatctacatgaaggtagtgtccacagagaataaactcattgtcacaagggagcttggcccaaggaaaatcatttggtctctcaggagtgagaactagaatatacctgaatttctcctccttaccagatgttgcaggcgtcagttcatactcactaagtttatcttctacttacaacttaggataaatgccagtttaatgcacatacattttcaacagtattataagtttgtcttgctcttcaatgggacccacagaaacctaag

SEQ ID NO: 139397 - DNA, 1077 bp, Homo sapiens
agactctgtctcaaaaaaaaaaaaaaaaaaaaaaaaaaaaacccagtttattccattgttatcatacctgcttcccccagatatacgagcaatgcaaaaatttttattgtctttagtagagatcccagttgtcgaaattggagaaattaatgtattctcttgagcccaaacacctgttcatcctgtatcccctaccacgaataatcagttcttgtcatgattatgataggcctgttgagaaaattgcccatctccttattataatttttatgcatactcaaaatgaatatttaaactgagttttgtcaagagctatgtccagttattaggtatgcacaacggtatgtgagtagggtatatgcaaaattgggttttaatataaaaataaaatgctgagatttttgtctcatcctaataaaataccaagaactccatctacccctccctgcttttctaacactcctagtcacaaatatatgctcaaaaagaagataattatcataaggcatctttattattacagattactcgattgtaaatctttctttggcaaaatgacttgattgattttggaatttgagcctctttgtgatacactgcttagaagtgaccatttcagagaaggcaaagggggacttaggcacactcagaaaagcatgctgaataaatagggggaatcacactgaattgccaaagattattttaatggctcaaaccccttcctgttacgataattacaggaacatctttaagctcttctctgaagaacttgtgaattgaaatagaaaatgttttaatgaatttaaattatttaaaaattggtattagaattttcaggatgaattatttttgtattcccctcttgtttattaagcatgagcagttattaatgcatttttcctcctgtaatacacttattatttgtacaattgtgtatagtgttatgtcacatagaaatatatctctttaggatgattattattttaggaaaatatgcagaaatcacattgtagcagaaacagctacatttcaaaataacatttattctttttcaaattgttttttataaaaagatct

SEQ ID NO: 139398 - DNA, 1039 bp, Homo sapiens
aaataaggaaaggaatgtgagctggtactgataacgcctggtactgtggcgtgcctgggcatctaataaaggcaaaaaggaaataaggagaaaaaagaaaaaagaagggaggagggtactatgaattaaagaataaaagattgatcaggttatttgaagagaaacttcatcatatcccacatcatacatagcatttatcaaaagctgattagacatagtttgtgaaggaatatagttgaggtttagattggagggtggtttccgatcagattttatacgccttgaatactcaggtttacagtctctatcttatagtcatcaagtaccagatataatttttaaagcaggttgaatttatacaaacaggaacagaacatggaagacaatggaggtgaagtctgtcagttaaaagagtttgagtgttgtaacatcttaacgtaaggtgaacatgacctgaattaggtattttgtgggagtgcaaatgtaatgaaccacaaaagacattccaaaatacttgacaagagtaggcaaacggctgaataggagggttaaaaaacagagaattgtacctccccatggtttttaatccaaatgacttggaggataaagtgctgctaatattggtaatgaacacatttctctccagagactgactgactccaaatttgaagccaaatttacttttatggctatgcttaaactgacataatgatatattggtctgctttcttttatgaaatcagctctaaaaataaatattcttgtattcagactttctgtgtgttctgttttcatctttttactgtagctaaagatcactttgtgactttttcttgtttttggccaaaggcttttgcaaaagcaatgaagttatgacctagttctgtggcagaacaagtatggtctacagggaaacctgacttggagcaacagatgtggttttagacatgttgggtttaaggtggtgtcaagatatcctagtgaaaatggcagttacagaactatggctcaaggtcaaagaacactctgaatggtgaat

SEQ ID NO: 139399 - DNA, 1039 bp, Homo sapiens
ctttatttcctgaatttgaatgttggcctgccttgctagattggggaagttctcctggatattatcctgcagagttttttccaacttggttccattctccccgtcactttcaggtacaccaatcagatgtagatttggtctttacacatagtcccatatttcttggaggctttgttcatttctttttattcttttttctctaaacttctctgcacaagacactttgagaatttgaaataggctagcagttgtgaataatgtcattctaaatgttcagtatagtttgtacctaatttaaacctgttagaaactataagtggaataatgtcatcaattttctattattgttattcttatatataagaatataaaaattaatataaaaatttattgcaatatagtgaataattttaaggtgcgtaagtatatatgtttgtgtgtgcatgtgtgtatgtgtgtatggatatataaaaactggcaagatatattgaacaaggtaaaaacaagtgaaagtaaatggtttctctgggtattacagtaggcaggattctaagacggcccctaagatttctggcacctggtatatatgcgccttctcccagttattcagttaaacactaacttgggtgttgttataaagagattttgcagatgtaattaaggtccctaatcagttgaccttaagatagaaagaaaatatgtgtgggccttgcttaatcagatgagactttaaatctggatctagaagtcagagatagaagtcagagactccgtagatggattccacataaaagacatctatatttcaagcttggagatggaggtaaatatataggtggcttctaggagctgatagtggtccctagtcaccagccagcaagaacacagggacttcagtcctgccagcacggaatcctgacaaaacctgagtgaatttcaaagagaatccaaagccacaaataggattacagccccagagcacaccttgattctagccttagtgagaccctgagcataatacccaactaagccatctttg

SEQ ID NO: 139400 - DNA, 1287 bp, Homo sapiens
tcagagcagtttaggcctcgatggcaaggtttccaggagcacagtttccatccactaggatcagtgccttcactctggctaggtctcgtttaaatgccctctccatgggtgggtgtcagctgagtttgttcaggttttcctttttactgtaacaagagcaaattgagttcagtacctcacaattgctgtgccattcctcccacagctcccagagacattctatacaccatgccactattgctggggtaggtaaggggtagtgttagaaattcaagactgttttttctatctcttcagtgccactccatctcaggattttgatagtgaaggataggtagatcttgtatgatatgccaaataattcatgaagggatttagggcagaagtcaagtaggattggaagttttctggtccaagtgcctgagtgaatagtacatagtggtgtccggggttgcagttgtttgggtgagtgttggtgatagtgttggaagttgacatggactcgatgaatccagcttttgagaacgtaagttactgtgcaatgtctatatacgacattctactttgcttcccggtctaatacttgatctactttttccattcattgattcagcaaatatttgagtttcagctatgtgccaggaagtgtaataaatgctagaggtgaagaaataagacaggaaaggtcccacctgtagagaggttataagctagtctattggggaaaatgagcattaaacatcatatgattaattgcagtttccataggagctaaacatacagggatttttgaaaacttttaagaaggcgatctcattcagtccagaaatatgatggacctacctgaagtggtattttgttgttttccaagacactcagttttttttttttttttttttttttgccgcaatcctgaagctcctccttagttacagcagaatctcacatatactgacagcctcaattctcttatctggaaaatggggatgatgacattcctcacataatactaaatgaaattaattcgtgaacaaaacatagcatgatgcttgacaatacagaccctttctcttcctgttctcctagtctggtactcgcagctgtctatttttcagcaacagagatcagcagatgttagcacacctgtggaaactggcatttaagatagtacatccttggaacatatcaaccaatctaaatctgccttactctctcctgtttttgacatttcatcatctccatcatcattatgatgaagagtgctttcagatgacttaatagagaaaa

SEQ ID NO: 139401 - DNA, 1050 bp, Homo sapiens
ttatgtaattataatgattatgggcataagaaggattatggagaagaacggagcaaaataaaagcttcattcactctgctgtcatatttgattatatcttgaggtcaaattgatctttgctattgtcttggctgccggctctggctacagctaatcctgggcaggctttgcagctcctaccacttccaggcccacagctgcaatcccaagcttgctcaccaaaacaagtgtttattcattatatcttcagtagattttattttataaatatgaattgtttatatgcatttctaatatgtcaaatgctttactagctttttaatatctttatatccattttccctggatcattacttactgttcttaactcagtggttcttaactggaagagattttgccacttaggggatacttgccaatatctagaaatattgttggttgtcataattggtggcagcagggaatgctactggtatttaataagcagagacagagatgcttctaagcgtcttattggacaaaggacgacctcacacaagaaagaattatactgcctaaaatgtgatggtgctgacagtgagaaaccctgagtttaacataatttgctcagaactctaaaaatgattcactttccaaaaatttgctgcattttttcttctggtcagaatgtgcacaatggaaattcttcctgaaggatttgtgtgaggagacctattctatagctgttaaatgattggcagggaggttgatagatggaggtgaagtcagccaaaacttaactgatatttaacagccaggaaatacccaacctggaaagtattcattcatagcatcacaaaccactaaagaaaagtgatattttacctctgagaaagttaacagcaaaagtatagtctttctaattagtttttagcttgcaatctaaataaatgacaagtagagaatatcaggtcataaaatatcatttaattttaagaaatattttcataagaatattgacataaaagtgatttaagaaagtgaaagttacatttagcacaagattttgca

SEQ ID NO: 139402 - DNA, 2605 bp, Homo sapiens
gctgatctgacaaagaactgctcaattcatgcaactttctggtggtttcatttgtttttggtaaagaactgtaagcatcaagcggaatagatatggaatctatggcccttaaaatacttttcctaaatactacattttgtcacaggagaaatacttgattatatctctgagttaaaatatgaccttcttaagggagctatgcttattctaagcaaaatatgtactatgtaattatggatccaccacatagccatttaaaatctcataaatgaggcatgtatacccttatctagtcaaattactttcagaaaaaaatctatcacagctgacatttgcctaggacccaaaggaatagtcaacctacttaaaacatgtgtccattaagccaatggctcacagacaaactttttgaaagagttgtcaatttttactgtcttcccttccttgccacccactcacatttttcttaaggcaaattgactcagttcctcacgactccaccaaaactgttcttaataagggcactgatgatcgctgttttgctaaattcagtggatactttttgcttttttcatcttttctttattcattccataaatatttgttgattgtcaactgtgggtcatgcactctcttcatagaaagaaagatatcgaataataaaatttcaacgataagttaaatgatgaaaaagtacagggtactatggaagtatatgacaaaagacatcataggaaatcaactgacctctcagtagtacttcccctctgtgacactacaattcactgtgatttcctccttccttattgactgttctttctgtttccttgctgacaacgccttccctatttgacctttaaatatttgctaaggacatttgtgctttacataaaacagttctggtcattctggcataactatcaactctcaaaattctctccctttaactctcaaaagagtccaggtttggactgtaagtgatatggccatttttctacctgatctcattcagtaccaaagcattaaatagcacatatatatatgctgatgactcccaaaccttttcctccaatgtgccattttttttgagctactgacctatatgttgaactgcctgcttagtaaataacaatttgatctctccctgggaactcgagctcagaatggccaaaactgaacttaatatgctgtcctcactacatatctagttgttgaagccacaaacctggcattcaactttgaatccttcctctctgacatatccttattgtcagtcaaccaccaaaacccgtatactacattctacccataccttaagtcatagtgctcaagtctagccaaccaatgtctctcaccggaattgttacaaccatctcctaactgtgctcccaagttttatgcccacattcccattagttactcttccacatagcagtcaatgtgatctttccaaatctcattagatcaacatcttgttgaaaactctagtgatttctcattgaattcagagtaaacaccaaaccttcaacacatcacatccctgcctttatttctagtctcactttgtagctaattccacctttgctcactacacgccaggcacactgcattctttctgtttgagaaactttgcctactattccaatgcaactattatttccttagagaaagtcacatgtcctctttatgcattcagatgtatttatttccatagtaatcattaccagtaagtagataattgtgtcttaagtaagctaaaaattacttattttggtgtctgttttcttttcctggctatacactcagtgaggacagcaatttttgtctgcttaaatattttttgtctgctagaaatatttttagcacagtgcctgacacattatagacttccaataaatatttcgtaaaacatgaaataatggaagggccatggttagatggggaaaagtgtctttagacacttcctcgtcacctgaaaagaatttcagattgctgatacttcagaatacactctagattgaaagtttgaagataaaagaagtatagggctcaggatgaactcttggagaaaagctcccttccattagaaatacttgttttgcacttcacctaagaatgaaattcctgttgtgttaagtcattgtgacttatttctcttcagcagtttgtgttgtcttaaatatcctttgcttaatgcttcaaggcaaatttgagtttcaatttgactgatgagattatcagtgactacagagctgtaccaattagtttcagatatttgatttatgttcaattgactgtgatgatgagaacggttagaataagagcaatcaaaaatataccttgataaccattaatgatatgtcatgaaacttttgcaagaatatttctacattttataatcttccaggaaaaggatcttattaatttttttcactgagcaggagccctgttaactaagcttttagactcaatcccttagtatcttaataaattgggaccatttatttgtaattgatagaggagggagggtttggacagagaagaatactactataagcaaaaacgaggaagatatttaggttggtaagacattcatacttgtcta

SEQ ID NO: 139403 - DNA, 1726 bp, Homo sapiens
ttcaggcttttcaacctcaaacaattttctccatttacccaattcatttatcattaaatcatttttattcctatatgtgcttcacatttcttataattacctagtactttaaactttttttacaataacaaaaaatattttagtaaaacataagatttacagaagtttccagacaagccatacaaaatggtcacaagcttattttgaaggggggactctacacttgacagcaaagtcacaatgttattagtgagggcagtgatgcttgttaaatgttcccattttggttcaaacaatcaagcttgtccatctacagtgtctaaataaagttagacttggatagagagcatatttctaaagaactggttagctgcttttaaccaatccaattagatcaccaaaaaggcggggaaaggagcccataaaattaaaataaaactacttacccccctcaaaaaaataaaataaagaaaaacacccacacccttgcagctaacctgacaactaccttcattcacagtgctttatacttaaaccaggatgggggaaatgaataaaagcagggagggaccactgcttttaaacgtttcacaacaatccggatgatacgtctagcctctgctcatgctttatgacagtgaatcaggacaagacatagatttgctaatgtacatttaatcaccaaataactgaagatgtctgggtttttttattctgtaatgtttctaagactatgtccattaaatgcaagcaaaaaggaagaagtcttggcagaacaggagaagtgatgcacacttaatgattggatcaatttaaatactattcatggcatatagcctagtccatgctctagctgtttcaatggcttgggcttcgttggtcttccactgctccactacatcatttgctaatggatcatctggattgggagcatttaacaaggcctggatcgatagcagaactgtgcggatctgcagggctggggaccacttatctttcaaaatatctaaacttattctttccaacttgtctacatttggatgataaattttggtcatgaaacgtactttaggggctgccattgggtattcttctgcaagtaatagttcacgtttaaaagtccctccctcaaagggggaatcctttgattccccagcaatgaccacatgaaaataacgggcgttgctttcatctggttctgctttgatgccaggaactggctctgccagcaaacgctgggtttccttgatgatcctgtggggcagctcggccatcagaacctgagttcggcctctggtctcatccagtactttatacttttatttctacttaaaatgtaatatcatttaatcatgtattaaacagctatatacgaaatatatgtgcatgggattttaaaacaatttttaatctcaccatgttaatgaaccatcttgtagtttgaaactaaggtcaagttatttttcggccaggcgcagtggctcaagcctgtaatcccaacactttgggaagccgaggcgggtggatcacgaggtcaggagatcgagaccatcctggctaacatggtgaaaccccgtctctactaaaaatacaaaaaaatagccgggcgtggtggctcacgcctgtaatcccagctactcgggaggctgaggcaggagaatggcgtgaacccgggaggcggagcttgcagtgagccgagatcgcaccactgcactccagcctgggc

SEQ ID NO: 139404 - DNA, 1209 bp, Homo sapiens
atagtatttaaattgatccaatcattaagtgtgcatcacttctcctgttctgccaagacttcttcctttttgcttgcatttaatggacatagtcttagaaacattacagaataaaaaaacccagacatcttcagttatttggtgattaaatgtacattagcaaatctatgtcttgtcctgattcactgtcataaagcatgagcagaggctagacgtatcatccggattgttgtgaaacgtttaaaagcagtggtccctccctgcttttattcatttcccccatcctggtttaagtataaagcactgtgaatgaaggtagttgtcaggttagctgcaagggtgtgggtgtttttctttattttatttttttgaggggggtaagtagttttattttaattttatgggctcctttccccgcctttttggtgatctaattggattggttaaaagcagctaaccagttctttagaaatatgctctctatccaagtctaactttatttagacactgtagatggacaagcttgattgtttgaaccaaaatgggaacatttaacaagcatcactgccctcactaataacattgtgactttgctgtcaagtgtagagtccccccttcaaaataagcttgtgaccattttgtatggcttgtctggaaacttctgtaaatcttatgttttactaaaatattttttgttattgtaaaaaaagtttaaagtactaggtaattataagaaatgtgaagcacatataggaataaaaatgatttaatgataaatgaattgggtaaatggagaaaattgtttgaggttgaaaagcctgaatgtaataaaaatatctgttagaaaaagctaaaagcaatgacaggcagggaaaaaattatatgcaacaaatatagaaggtaaaatatacttactatataaagagctcttattaataagaaagagttcttgtcagtaatacaaattctccaagaatacatgtgttatattgctttacaacatccttatattattattgtcattgtacagataagaaactgagccactttagagctcatgaacataccttagatttctcagaaagttagtggtagtctaggtatccaaatcctcatctgcctgagttaagagctcctctctattgtactataagtcaacatttgttaatttattaatattataactgagcctgattcttcctgtacttc

SEQ ID NO: 139405 - DNA, 1025 bp, Homo sapiens
tcttaaaacccagttccaacataagtctgtcggccacaaactcaatgtattacttcattaaagtgcagttcatcctaatgagcttcactggcaagtcctcagtgaggaactcatgttctatcctagcagctttgataattacttactttactatctgctttgatggtctgtcatgatatttggaaaatgtaaaagaaagtagaggtttctttctggatggcccaggaggtggacctgtccaaggacatttggcactgggaagccctgaagcctgagtaaagatattttatatcccatattctggctttctttgcagcatgtgatgggataatagatgaaaacttggtggaacaatttgttcaagaagttcagattacagaaaccttctgcttctatggcttccaaattgctatagaaaacatacattctgaaataaataatctccttattgacacatattaaagataacaaagaaagggaatttctcttcagtgccattgaaacgatgcctgtgtcaagaagaaggcaggttgggtcttgtgttggattgggaacaaagacgttacccatggagaacgtgttgcatgcagcctttgccctggtggaaagcaccttcttttctggttcttttgcattgatattctggctcaagaaacaaggactgatgcctggcctcacattttccaatgaacttattagcagtgatgagggtttacactgttactttgcttgcctgagtgggtgtgttttaaagttagtcagtaatgccttcttgagtagaaaatatttgggcaatgacttaaagaatgtgagagagtcaacaatttgaataatatctaagggaggaagagtgtttttaacagagggaacagcaagtggtgtctccagacaaaggtttgactggtcatttcaataaatagcaagaaggccattgtgtcttatgctgagtggggatgaagtgggaagctgtaagggatatggacagtgaaaaatttatggcaaaattctaagggccttaaaagcta

SEQ ID NO: 139406 - DNA, 1190 bp, Homo sapiens
cgaggaagtgaattattggggtcaaccacattttttttccttcctacagtctgattgccctttttagtttttaggatctttgtggctgcatcatttttccccttttgaactgtgcattttctaaccccatacttaaatattctcataacctccaaattattaattagatgcaacattcagtggtatattactggagtttctgatttctgcccactataggaatgtgcttcctgagaagattgggatcgtgattataataatagttaacaggggatgagtactttctaggtgccaggcactgttctctctgatactttatttgatgtattgttgttattcccattctttaaatgatgcacagagaggttaggtaagtgacttactaccaagtgtcagggccattaagggtcaggattctgaattcctgaaatgatgaaatttagcttgaagaaattggtttgatttcctgcttagttttcaatttcatggtggtctttgattgtattttgtgctataacactgccttagcatcctataactatagttacagtgttatattaccattttttattgttaatacaaagccatcatgaaataattcagtttatgtgccagctttttttgttactaattcttgaaccttggcgctgtacttcttcatgtggatgcctgttaaggaaagataaagttagaaatctttgaccctgctaggaaatttgtctttgttatattgggagctcataaaactgaagtattcaaaagttagaatacatacacacaagaaaaattagtaactaatttaataatgttttctttgcacatgtctctgttgtcttttggtcagagtgaagctaaatgtgtttttcacataatttgtagcctatatgaagtcctggacatgtggtatggttggaaggactgttgatgaggtttattgtctctctttattcttttatgttgttagtgtccccatacaacggggcggggggagtggggacaaaatgataacttgctttatatatgaagccttgggtttgaatcatactgttatcacatttcctatgtccctatcctgtctcctgcaggttttctttcttggttttcttttttggttttctttcttcctttcttcctttcttttcctttctttcctttcttccttttttctttccttttcttttttcctttct

SEQ ID NO: 139407 - DNA, 1616 bp, Homo sapiens
atatgattattgtaattacctctttggcccagttgctagtaaattagggaccccttaatgatttatttcctgtttattcaccctgatgaagaacttgtatctcttttaaactgtactttatcgcctttctcaaattccaagattctcatcacattttttttcttcccaaactctaaataaccttttaatattaagtatctttgtggaaacattgttttctttttctatcccaatttttaaagcttttttaaaaaaaagagtgcttttgttgggatgtacattttccaaatgcaaaaacatttatgattctgtgtctcttataaaatatgacactctctacttttctctcatttatttagtgccacctatgtgtgtaatttcattacccacagcagtcttaggaggctggtcgagttccttatttgcagatgaggaatctgaggtccagagatcacttcttggtgagagtctcacagctattaagtattagagccaagattttgaacgtaggtctgattcacagcaaaaccgttaaccactaagtacactgactccagtaagagccctagtcctcacccaatacactttaattcccctgtgcattcattcaaattcattgaatttgctgcctttggaaacctctcaggaacctcctcaacctctcttctctacagacatcagctttgcctgataggtagggatcatagcaaaacacagttttccaaggtggtgataggtggagtgatagtgctctggagatggccaaagaaggaaggtatgagtgtatctgtgggtgggtgagtggtggataaggggaaggacagagccaaaagcgacggctattggaaaaactatgatgagaaacaggaagatggaaccttgttggaattagtgaaagaccttagaattcacaggaggtatttgtccttcacgcgagtgtagaccaaacgtaacctatgagtttcttttattccacttattaaagcagcaaccaaaggtattatataccttctgtattcacttaaaatgactgattttgaaaaagtcatgcaaacatccatttacagataagcctcattaactcaaaggcagtggccctgttgggctctgatgattactcaaaccatttctgacactctgacactacatccggaaatcatccggaaatgcattcagagcctgcaaaagctttttttttttttttttttttttttgaatagctacagcacttgcagatcttcctcctttgagagaatatttgattttaggaaataagcaaatgtagataagtatgattcaactgggcaataacttttaggcaaagagaaaaaaacaaaatatagcaatgtagtaataaggctgatattatagtgcttttatgatgagtctgaaaacagtctccaacatttgtaaatgttttaaatcgggtctgtctactacagtagcccttaagccatatgtagctattgagcacttgacatgttgcaagagtgaattggagactgattttaattttatttaattttaatgtaagtagtcgcacatgacccgtggctactatggtagatggcatagttttagacaagggcagtagtcttgggtagatacttgattta

SEQ ID NO: 139408 - DNA, 1064 bp, Homo sapiens
ttttcagggtagctgttggtaagattgtaaagtacatataaactccttagtcaaagtgtagatgtggctatgatcttaggattttactaaactctgatggatggttaacagttatcatttttttggctcttatataccaagaaaattaataatatatcaaaagcaggctgcaaatctatagagacagaaagtagattagtgattgcttgtgctggggctggtggggagaacatagctaaagagtacaggatttttgtgtgtgtggcaatgaaaatgttgtaaaattgactggtaattattgcacataactgtaaaccttctataaaccattgaattgtacatttaaattgatgaattataatgatatgtggattatgtctgctaaaatgtagtatgtgacccaggcatactgagcaataaatacacacatcttgcttctaaagtttaaaaccaggcctgtgtttcagtgtctagaaaatatatttcataattgaacttagcagattcttttggctagcaacaggacaaagtagtatccttagatgcctgaaacacgtgtagggggacagagataaaaggattaaaagcatctaaccctatttctggctctggactaataatcgcagaccaaaatacaagtttgaatagtagaatacctttccctgaatacataaagccaaaagttttagtatttgtctcttcgctgtttcatatatccatggctatgcaatagacaacagcatcacaccaacagaggaatctttgataacttggagggtatttttttcttacaattatacactttatctacttacttacatcactaggtaaatgctgtttcccataaagggagagttgtctttatttgctactcttttagtttttcctgtagtctataatctaaagtgttaagcaaacactcatttcctctatgcatttaagaatttgtctagtttatacattgatttattagatcacttctttttaattttcaatcagatttctaccataaacttaaaattatttcatctttggaccttccaattatttatctcctgtaccat

SEQ ID NO: 139409 - DNA, 2109 bp, Homo sapiens
ataatttgttgtaaagatcaggtcttaccttgttgcccaggctgctcttgaagtcctggcctgaagcagtgctcccacctcagcctcccaaagctctgggattataggcttgagccaccgcatcctaatattttatatttttatggatataaaaaataatttggtatctttcagagttgtttaatatcattttaaatttaaaaacataggcaacttaaactcctataggctgtctccatcgggtttctgtggtttaggagaccccaccatcccagtgcatgctgataacgtcatactgatcagcatccagctacccacagcaagaattgaccacctcgtgggatctaaaatttaaagggggaaaagtgagttgtgaattgctaatgtgctgatagccccattttgcttgggaattagagggcagtttttgtggtccttggaatgtggttaaaattcttctgcaagtggaagcatatttatattactaacaattactggtactaatattcaaatattgaaggaaatttctgttgtggacttatgtttaaagctcttagaagttgaaattattggaaagaagacttgttttgaaaatcataatgttgctgtattgtgtttagagaaatattccaaacgggagtaggctgctgtgctgcatgcagactttgctgaaatgttactatattgccgttatgtcccactcagcaaaaactgatgattttaaagcttttgcttcttgaaactagaaaaagaggggtcagccttaaccaaaagttgatggcagagtggtcattatttcagttaaacatgaaaagcatgttaaataattgtatgtttgcttatttacagctggcagcctgataggcagattccatttcatgatgtcagattcccacctcctgtaggttataataaagatataaatgaaagtgatgaagttgaggtgagttttccctgccataaagtcatttagcactgaaagagtggggttaatttatctgtgtttttttttaatactttgtctttaacactgtttaaattactttgagaattacagctggaatggacacgtgcttttgactaactcatcttattaataattcaaaatgatacatgatgcttacatttggctatttgagcagtactcagagcatgtatttgaaagtcactgccgcaagttcctttgcccactagtaattcttttctccttctctcaatttctgaatctttgaatagtatgttgtttgtttacaactgtgtccccattgtaagcaaaatggattatgaaaattaattttacacaggaaagaaatcatgctttattacaaaatagtatactagaatttctttaagtagcagtgaatcttcttggtatatttttaaaaacctacaagctttagtttatacatattggtaaaatctctttttcacaggttataccgtgaactacctgcttatctcccgttgagctctttgaccaaaatgtgctatggagatctaacatgtgaacagaaatgttgtgtttgtgatttctttctccattagaaattggttttgtatttaaggcgcttacagtgcctcatatagtttgtgtggtatcttctctcctttgtatcctttcacatactccattttgagctgcttctcttctttttctacaataataagcataatgccttactattagttaataatagttgccgttccatgaatatttgtagtatgaaggatgtcgctaagtagacatttgtgcaggtgaggcagagtggttctaggtcctgtccttcagttctttatttatttatttatttattttttgagatggagtctcactcttgtcatccaggagtgcaatggcgcgatcttggctccctgcaacctccgcctcccgggttctagcgattcttctgcctcagcctcctgagtagctgggattacagtcgcccaccaccacgcccagataatttttatatttttagtagagacggggtttcaccatgttggtcaggctagtctcgaactcctgacctcaggtgatccactcgcctcggcctcccaaagtgctgggattacagatgtgagccaccatgcccagctggtccttgaatt

SEQ ID NO: 139410 - DNA, 1061 bp, Homo sapiens
tggttgaggatatatgacatgtggtttttaaagacacctaggggcattttaagaaaatttcctcgatatctgaaaatctgtagatttcaaaattatgttaatcatgaaatattctgtgttgtaatttttgtgtaggtgtattccagagcaaatgaaaaagagccttgctgttggtggttagctaaagtgaggatgataaagggtgaggtaggaaaatgcctatttaaatttttttcttatattgtttcctttttttaaacccaggttgtacattcccgtgtggatttctattttgaagtaatatctaattttgagtaatttaattaaaatgttttcactatgtgttcagtatgtttctgttggtcataaattttttcacatagattatttattttaaaataactgaatagggagaacttcttattcttactttaaaaattgtgattagaagtgacttttatttatttctcagttttatgtgatagaatatgcagcatgtgatgcaacttacaatgaaattgtcacaattgaacgtctaagatctgttaatcccaacaaacctgccacaaaagatactttccataagatcaagctggatgtgccagaagacttacggcaaatgtaagttgatacacaagaaatgctgagaacttggaagtgatatgcaattagtttagaagaatttctagtagtttaaaattttttaaactactagaaattgattttaaatttggtggactttggcaaaaatggtttggtttgcaagagcaatggagaaaaaacttatttaacttttcctacttatagaatcaaggcagccttgcgcttgtttaaacttacttggctatacacgtgtctgatgtacataatgtacatttgttttctaaactaactttgttcattctaagatttaaaaactgatcaaacaaatgtgataattctgtcataagtcacaaactataaacgatttctccgtttttttctcttttacctaaaatgttttcagataaatgtgtaataagtagagccaaagaagctttaaaaagtcatctcatcttaca

SEQ ID NO: 139411 - DNA, 4152 bp, Homo sapiens
cttaccccattctccgtgatgtgcttatttcatattgcatgcctgtatcaaaacatctcatatgccccataaatatatatacctactatgtacccacaaaactaaaaattaaaaaaaaaggaaaaaaaaaggcctgcaacaagagaagaagaaagaaatcagataccctgtaggtagctatctcccaaaagttttcaatagttgacttaagaaaactactgacttgtatgtaactgaaatcaggaaacctgtagtgtagagtggttcccctgaatatgtctcttttggtaatctaagctgtatttcagaaatgtacagaaaaggagctaagcttctaaatggatatagcatattttgcataaatcaaatttaatatgaatccatgattcttgtatgtgtaaatctgcctgcatttatttatgtcagtagttggtaattattcatcttaatttttttttttaaatttctaggtgtgccaaagaggcggcacataaggattttaaaaaggcagttggtgccttttctgtaacttatgatccagaaaattatcagcttgtcattttggtgagcatttttgagttgtttatttttagtttaattcatctggggcaattgccttgataataatgttgttaatttaaatcatttagtccatcaatgaagtcacctcaaagcgagcacatatgctgattgacatgcactttcggagtctgcgcactaagttgtctctgataatgagaaatgaagaagctagtaagcagctggaggtatgtcactttccctagcactgcttgtaagggtacctaggaacgattaactgtatcattccacaacttgaatatggggagcttgtcatttatttactgcttcttaacaattccttaggttctatagttggaaaattgtacaaagcataatcatactaaagtttccatgcctgaggtttcaaaattaaacagcagcttatgtatattaagggacttctggtactttcacttttactagaagtttatcaaagttgctaataaaatgcggcaatgcttcttccatataacatgttgtcattaaaaatactagagaatatttaaatatctaatcatattcctctcattatgtatgtttatctttgtttaaaagggtatagaacttcttcattctaattggttgtcattctttaaaactcctgtcttcagattcccgccagaggctatttccctaacttactattttgtctcttaaggtgcattttatctacttttattaatcctccaataattttcatcaccatatatttgttttcattgataactatcaagtacgtccatccattactatagaaactaagtggatcttagatgaatgtgccagctctactatattcctgtcaaattccagagttcgtcatcattattcattagaaggaaaacaccacacatttgaaatagtaaagaaaaaaaggagttccaaactgcattttaggagaaaaggtagtcaagactgtgttcttataaaaaccctgtgaaatttgccacctgtcaacttgatgtatgatgctgaactcttagcagaaggggaaaagtttaatctccttttgccactttgttttttcttaaggccatggaggtctgtttaattggtctttgctctcattctttcttgatgtccctgtgttcatgattttgtggttccttcagtgattctctcataacttttagcccagagctgcctccttactttgattgtgagtattatgaaaatatactcatatgcctcttaaacatcgaattattcttaaatgatctatcatacttttggctaaccatttatcagtgaattatcaatgaaaaagaacgaaccagattaatgaaccaggactcaaaaaacatgacttcttgaaaagtcctagaattattttatagattttattactctagtctaaaaaaaatgggtattgcacttttaaattatttatgctagttgtattcattcattcaaattatcaggtctgttgaacaatgagaaactagtatgcatgcctatctttcttcactactaatattaaagagatttacatgttcctataagaaattcccatttttcaacatgagccactaatacgtttggttttcattaatggcatgctagaactgaacactaaattttgataatggtatttaaagacagtggttatccacaagtttgggatgtcagtgtaacttagtttcgtcatcactggatatttacaagtgctcatcataattgtggatccagatcacaaggtcttacggactctggtctcatgttagctttcagatgcttactaagtttttaatttttgacattttttgattattcagtttaactactgtaccaacaatttttgattccttaggttttgagggaggtgtcattttaatgtcatttcaacagaggaatgtttagaccacagtacctaatgatgttataaaaaatggcactgtttccagaaaatatatactgataccttttaataaaaatgaagcgaataaaattttctataaagatgatatttaaacatttttttacctaaataagtaacattgagtttgtcagaccgagtgagctggtttttactggggaacatttgacctgcttcttagttattatattgctgatgtcattggttaactaaggcagccttgtgataagttttcagcagttaccttggaaaatgtcaacaagttctttcctattaacaaaaacatataaaatgtcatagacctttagtaacctaaaaagtacttaggctgtgagaggtattttctaaaacctgttagttttaacctaaaactattaataatttatggacccctcatatacagggtcaagataatttacatggctggcctaaatacagttgtcgtaatagttgataaagtgtattcatcagacgtccatttctcttcagagttcaaggcagcttgcctcgagatttcatgaacagtttatcgtaagagaagatctgatgggtctagctattggtactcatggtgctaatattcagcaagctagaaaagtacctggggtcactgctattgatctagatgaagatacctgcacatttcatatttatggagaggtaaatattttactgcatagtttttttttccccaaacaagtatttcagctggctaatcttttgtcttaaaatgtttccccttttattaggatcaggatgcagtgaaaaaagctagaagctttctcgaatttgctgaagatgtaatacaagttccaaggaacttagtaggtaagtcagaagtatctgttgacatatagtacaacaactaagtttaggtaaacagtttatttatagtgatagaattccattttttcttactggagggtatcatttaattgaaacatagtctttgaaatatgatctgttctttttttttattatttaagttttagggtacatgtgcacaatgtgcaggttagttacatatgtatacacgtgacatgctggtgcgctgcacccactaacttgtcatctagcattaggtatatctcccaacgctatccctcccccctccccccaccccacaacagtccccagagtgtgatgttccccttcctgtgtccatgtgttctcattgttcaatcgatctgttcttacagcatacaaaaaaatatttgttaagtatgatgctcaaaggttacattttcagaaggtattcaaaagagattgcttttctagttcaaacctactaatacctgaaaggataaatcttgcccagccctcctgactgtataccttttatatcttaaaattaaataatttttcaaaatgaatgatatttggggactttatgatttgaaatagatttgtatttgatctttcttatgggactataaaatgatagcattcattttaattatctcagggttgaagatctgaacataggttacttaaatctaaaaagtcccaaagctagaagaaacttcagatgtctctgggactttctgcaaagtcaatagtaattctccattttgacttgagtagtgttttatcaccatcaccatcgtgagtatcagcaaatatttaggagctcttcaccaatactcctaaatgctgcagatatctttagtagaacatatcaaaaccaggtgcag

SEQ ID NO: 139412 - DNA, 1037 bp, Homo sapiens
aagcaaatttttgcttccatcttttcccccaactttgccttgagctttgcctttaaaggcgaaaaggaaaaaatggaagatgagatggtgagggcaagcacatggtggatgtggccaatgtaagggtacttaggtaccttgggtgagccctcagaatcagatgtagttcacatgtacatttccagaattagtaattcttaagtttgtaatgtcttgctttaccactcgtgtcatgatgcaaatgaaagcagtcattttccagtaatgtatatgattgtaaaataaataaggaaatgatcaagtacctattttttactggtacttgaaatcccaagttttaatagatgttactgaaaaatacttaaattggtttaaagctttttcattgtggttttgagttatcttaaagtgggttttcttaatcttttactctgtgactaatcccttcactttttaatacattgctaaagtttgtaagtaatgcacaggagtgatactctgttaacacattgaccttgaagaatttgtattccttttggatgtatgtatagctgcttaagccactttcagacttagattatcttttataaatgtgccttccatacagaattctgaaaatatttaccatggacaaagaagcagatttaaatcaggtacagacaagaattgaaagtgttgaataagtgaatatatttcccattctctctacttttttcttaattcttatagaactttgcagaaagaatgatacataccacagtaccagcaagtttaaagcgtacccttttgtgcaaaaataagaggttatctttgaactgccttaaaaatccaaaattaccctatcagtttgcaagtattaatcaactctggtacctgaccaaaggagtttaaacaatgatgtcctaattaaacagaaaaccagattaaccatcttgttgaaaagagtctctactttggttttgaaatcttacaattcaatacatacacatacacataaaaatatctatctatatgaatgtaatagtttacagtagggc

SEQ ID NO: 139413 - DNA, 1317 bp, Homo sapiens
atctgtttagaaatgggtttaaaagtcctgcagtgaaagtcctgcgttcaggcttctgtgtatcgtttgttatagttaatgacatcccttgcattccttatactgctttaggtgttagtggcttcatcagttgtagcaggggaatcccagaaacctgaactcaaggcttggcaggtaggaaaacattccttgagaaatacactttcagtttatattttaatgtttattccccttgttaacaaagattacaaatgatcctcaggattagggactggagggaggagtgtttgtgggtatgtggatccattgccctggagttaaagcttaaacaccttcatgccgcttgtaaggcttttcctaattacttgtctagttatcatctttaaattatcttctcccttgcactctagagaaccttaagccatactgaagtactttgagttctctgaacattctcgtgcttattttgcttctagacatatgtacaggtttactctgcctggaatgctttttctcctccacatgtcacctcattttgaccttattccttacaaagctttccttgtgtacttgccgaagatccccacccccttgactggttcaagagccttccccttctgttttgcaatgtgctcacccctagcatagcacttaaacatagatgtttatttgttgatctcctcaaccacattgtaagttctttgagggcagggagagctggtgagaactgtttatggaaaaaaatgttgtggactcatggattaaaagcaaaggtgccattttacaaagaggactataacggcaagtggattggatatgtctcattgccgggcagcccattattccagaacacagagtaacttttttctggggtccgtactaaaggccatcattccattcttgcctttcttcattttaatttactattcaggtctactcgtgaagtgcttaaattagagtggcccttggggtactccagcagtttagacatgttgcaagaaaagatattcgtaaataatttgctccgaagtcaatctaactaaatctgttacataggattttaaagctattttggtgatatttgacccagagggaagggtgtagcattcattccatcacatggtattttgggaaataatacagttaaaggcttttgtaacaaataaagcttgttggagaaaaacccaacatgcagaaatgaattgccagttattaatttgcacaattgtttctaggtttccctataacttgtgacaagaagtagttgttttttttttccctcttaatatatatatatatgggctaggagtacagaca

SEQ ID NO: 139414 - DNA, 4297 bp, Homo sapiens
gttaggattgcattgtatcaaatcccttgttcttttgactaatgttctttcttagatcctttgatttattctcaagaatatcttctttggttatcagcagctgccctgttgccattctttccatcaccagaacttccctcgtttgggcctggcatctctcaccaaaaggtgactgctttgccccagtgggataacctggactactcttctgttttgcaagatattcctattccatgagctattactatacctttggaggaagtcactcactcagctgcagtctctcctttgctcaaattctatgtaaaacagattctggtgtaactatgtaaattgctaatgatggcagagcacagatgaaacggaccaaatccttacctgacctttcttttccagaagctgccacaaccaagattttagaaacttagctttacaggagcttctccaatgactgttcatgtagacagtctctatgataacctctgcttcactgagacgcctactactactatagttatgaatctgattccccgtagccagtaaatgagatgtttatgagtggattggaaggacagtggttagaaatgaggtttcatctggttttaacagaacccaacatactggaagtgctttttgtaagggtctgtcattggaccccaggtgtatatttctatcaactaaatgtatactgtttctcgtacttgttgtagcagagttgtagtctttaggaagttttcaaggcatgatgtaagacctagctgtctggtcagctattaaatagttttgttttcccctcatgaggaatagtcagcattttcagttgatgaaaaaatcattgttccttaaccatagtatatgttcttttaaaacaaaagatggcccaaactcaatgctttgtaaattaagatattaactggcaaatctattttaatcaagattatttacaatgtgtgattttttaaggttagctggttataccttgaatgtcatttatctatattcatacattttagcatgttttatttaatatcctatcatgaagaagtccccaaaatagcatatctgtgccttagcagtagaataattggataatagtgccaaattagacaactttaaattttattcagtataattttactgctgagtgtttttgttatatctctaattcttgacatcaataatctgttatctgtagtaattttctttttaaggagatcattcaatttcctgataattctgtgtaacagtgtttactgtaaatttagaactgaaattgaaatattccagtatatttttatctgatgaaaaggagaaaggttttattaagtaaaatgtcaaattatttttactgttatcttgtatattttaaataggaagtagaccagttgcgtttggagagattacaaattgatgagcagttgcgacagattggagctagttctagaccaccaccaaatcgtacagataaggaaaaaagctatgtgactgatgatggtcaaggaatgggtcgaggtagtagaccttacagaaatagggggcacggcagacgcggtcctggatatacttcaggtacaaactaagcattttactcagtaactttatctgttcctagacttatagctgctaatctctaatattcattagaaccccattataacaatttgccgctacatggtttccaattcacagtgggttaaattgtgttacaggagacatagagtaaaaacctgatgataaacacgtagagttcacagggccggtgcaagttctgttcatgctctgattgggggtaaatctgcaaagcccttgtgtgttgatgattttcttaaggcctctcctgattttataactgtatagtcaaaacttttttcatttgtgtactgtggctcatttttattttgtcaggtatgtgctggtcatacttgctggatggactgtgtaaatcaggggtctgcctcttgtggctcataaggtgattttgagtgacatggccaaagtcagccctaggcacagtcaagaagtaggcgaagtttctctttgccttcccagcttttctgtccgtgcttctttcttctctcccagtacctttcagtgaacctgatccccacctgccagtgcctactgtctttcttgctcaacagtgtatctcctttgtaacttgctaatgatggtataaggtataatccatttcacgcatatttgcatttcaaaaaggaactctttaagatggaaaagccttcaagatccacaggaatgaagctataatggtgaagctataattggtcattagctccaacagaggaagagagaggtagtagagctgatattctggagttggggagagttacctactcctaaggccaaccttgaacctaacccctaacccctctcccaacagtctgttctttttactcatgaatttctgcctcaccgtggagctctttttctccgctcctgtcctctaagtcgttaaccccttcaggcataatgaatttattatagtaattctttattaatgatcaattattgtaatgggagtgggagggcaggttgtggaccaaacatcaggcaagcatgtatctgccttcagctagatccaatccatgacccacaagagacccttccctgaagcagttgccatggtggcctcctttgccaccctctcagaaatgaccaaaatatatacattcccctctgtcctgggccaaatcttgctaaaaggagctctctttttagaggttttgtttatcagggtatcacacttaactgtcgtggataatcttttcctccagagagtatagatgtttaaaggaacacagctatttaatgatatggcacatcaaggtttgaacttaggtggctaataacatacctttttaaaaatgagaatgaaacatgtttataaccaaaattaacctcaaatattgcaaagcccttcattttgagtttaaaattttgttttatgaaatggaaagtgataatactcttggtgggcttataaattgggaagagttttggattacccctgaaacgtctctggaagcttctgttaaccctcttttttttttttttaaagtcagacaatggtatataacttttaactctcgataggaactaattctgaagcatcaaatgcttctgaaacagaatctgaccacagagacgaactcagtgattggtcattagctccaacagaggaagagagggagagcttcctgcgcagaggagacggacggcggcgtggagggggaggaagaggacaaggaggaagaggacgtggaggaggcttcaaaggtatggagatcttcattaagaaatcaaagtgaattgtaacagctgtcttgaagttccatgagaaatcctattgatgcaatgaactgttaccaagatcccatctctcccgttttgtgctgataccataggaaaggatcagccttccacttgtgtagaaagaaagaatattaggcagccttccttatggttcatacagatatatgaataaatgctgataactaattcagcatcttggtgggtctaaacagcatcccttcattaactcacattgacctgtagatgcagaattataataactgtgaaatattttctgttacttagcagcaggctagattattagccattgtgtaactggaatcactggggtattgattacatttcagattctgtggttggtttaaatagagggtgtgggaataaagaacttccagtaagcatttcagaatcagtaactgttgaaccttttgaaaatattctcataggaaacgacgatcactcccgaacagataatcgtccacgtaatccaagagaggctaaaggaagaacaacagatggatcccttcaggtaaaacctgtctgcctcttttcatcttaattgtttgaatatggtagtttgagatttatgagtttattttactttattaaaaacatgttcaaagattacaaatccagtttatgtgaaatattttaccttcaacattacaattgtagtcaatcttagttctttgtgacaagtatacaaataagaggatttctctagagaatatgcagtctgagtatttgtgaagaccttgacagccacactatgattttattatttattatttatttttatttttttgagacgggagtttcgcttttgttgcccaggctggagtgcaatggcgcaatctcggctcagagcaacctctgcctcccgggttcaagtgattctcctgcctcagcctcctgagtagctggaattacaggcatccactaccatgcccagctaatttttgtattt

SEQ ID NO: 139415 - DNA, 2609 bp, Homo sapiens
aagacatgataggattgtgagtttttctctaactttggatgcagtgagatgaccagtgtgttccagttaaagaagaagagtgttttaaaatcataaaccaaataaagaatcctaccttacattaatttcttgcacttcttctgttctcatctccatttctctttttaacatgtggaatttacacttcaggtttaaatttcttgtcaggccaattacagattacagtaggatatggtctgtgtatataacaactataacttgttttagatcagagttgactgcaataatgaaaggagtgtccacactaaaacattacagaatacctccagtgaaggtagtcggctgcgcacgggtaaagatcgtaaccagaagaaagagaagccagacagcgtggatggtcagcaaccactcgtgaatggagtaccctaaactgcataattctgaagttatatttcctataccatttccgtaattcttattccatattagaaaactttgttaggccaaagacaaatagtaggcaagatggcacagggcatgaaatgaacacaaattatgctaagaattttttattttttggtattggccataagcaacaattttcagatttgcacaaaaagataccttaaaatttgaaacattgcttttaaaactacttagcacttcagggcagattttagttttattttctaaagtactgagcagtgatattctttgttaatttggaccattttcctgcattgggtgatcattcaccagtacattctcagtttttcttaatatatagcatttatggtaatcatattagacttctgttttcaatctcgtatagaagtcttcatgaaatgctatgtcatttcatgtcctgtgtcagtttatgttttggtccacttttccagtattttagtggaccctgaaatgtgtgtgatgtgacatttgtcattttcattagcaaaaaaagttgtatgatctgtgccttttttatatcttggcaggtaggaatattatatttggatgcagagttcagggaagataagttggaaacactaaatgttaaagatgtagcaaaccctgtcaaacattagtactttatagaagaatgcatgctttccatatttttttccttacataaacatcaggttaggcagtataaagaataggacttgtttttgtttttgttttgttgcactgaagtttgataaatagtgttattgagagagatgtgtaatttttctgtatagacaggagaagaaagaactatcttcatctgagagaggctaaaatgttttcagctaggaacaaatcttcctggtcgaaagttagtaggatatgcctgctctttggcctgatgaccaattttaacttagagctttttttttttaattttgtctgccccaagttttgtgaaatttttcatattttaatttcaagcttattttggagagataggaaggtcatttccatgtatgcataataatcctgcaaagtacaggtactttgtctaagaaacattggaagcaggttaaatgttttgtaaactttgaaatatatggtctaatgtttaagcagaattggaaaagactaagatcggttaacaaataacaacttttttttctttttttcttttgttttttgaagtgttggggtttggttttgttttttgagtcttttttttttaagtgaaatttattgaggaaaaatatgtgaaggaccttcactctaagatgttatatttttcttaaaaagtaactcctagtaggggtaccactgaatctgtacagagccgtaaaaactgaagttctgcctctgatgtattttgtgagtttgtttctttgaattttcattttacagttacttttccttgcatacaaacaagcatataaaatggcaacaaactgcacatgatttcacaaatattaaaaagtcttttaaaaagtattgccaaacattaatgttgatttctagttatttattctgggaatgtatagtatttgaaaacagaaattggtaccttgcacacatcatctgtaagctgtttggttttaaaatactgtagataattaaccaaggtagaatgaccttgtaatgtaactgctcttgggcaatattctctgtacatattagcgacaacagattggattttatgttgacatttgtttggttatagtgcaatatattttgtatgcaagcagtttcaataaagtttgatcttcctctgctaaattgatgttgatgcaatccttacaaatgattgcttttaaaattttaagctaggaaaagaaatctatagaaagtgttctgttacaaaatgtaactgttaccattggaaatttcacgtcataggaagttagcctttatctaccaactttcaagaacttgtttaataaagcgaaaaactcaaccaaatggtacaaaaccacagtgtaccattaaaatatgcactaagtctcttttttacaaaggctgtattcagcaaggcgctaacttgcttaaatgtgaattactaacttctaaaactgtactttgattcacatgttttcaaatggagttggagttcattcatattacaatatttgtgtgctaaacgtgtatgtttttcagttcaaagt

SEQ ID NO: 139416 - DNA, 2465 bp, Homo sapiens
aaagttgcaaattaaaacaaaagatattttgttttattttggccatcaaattggcaaataataaaaaatggagaggtgtcagaaaactggcacttgcctgtactactggtagaagtgtattttagggttgccctgctggagggtaatttggacatactcaagagccaccatgccttaagaatttatcttaagtaatttttcatgaatatttgcaaatatataaatataaagcttcagtgataatcattgcaagctaacgataatgtaatgataatcattgcagtgttctttataacatcaataaattgtaaacagcctaaatgttttcctatggagaaattgctaactgagttataatagagccatataatggaattctgtgacattattaaagatagttttgggaaatatttaatgctatggacaaatctgtgttatcctcttctctcatgtaggagggaattgtgtaaataagactaaaaaccagttctttaaaatagtgagaaagaaggataaggaaggttttactgtatgtaaggccttgatttttgtcaatatatatgtaagccaacatattttccaagactttctgtgatgggatctgatttagttggaatacatactgttttcagctcatcagttgattaggcctcttaatgccatttgtcagaggcaagtttactattgtaaatcagcttacaacaatggcatgtgtcagcctatagcttaagcatttgtaaatttaacactttttcagtttcacaacaaaattgcattctgattattaatgatgcttaagctgttatgagatgaaagtatatctgttagctatttgacattctataattaatttaagcaaaggtaattaccattcaagggtcattgaaagtgataaatgctttatatgttgggattaataattttacttcttcttaagggtcctcatattttgtgcttgcaaatggacatatcctgcccaacagtgaaaatgctcatggccaatctctggaagaagattccgcattggaagctttgctgaattttttctttccaacaagtaagttcttgtttgatttttttccccctctaatgttcttgttttgaaaacagtaattaaatgtttaggaagcagtgtggtgtaatggcactggagtgggacagagctgagtttgaatcctggctctgctctttggcttaggcaagacaatctctctgaacctcagtgccctcatctttgaaatgaagatatttaccacaaagaattatgaggatgaactgagataatattcataaggcatttcataaatgtttgttactgtttataaaatacttttccttcgcaaatatctaatctttcacaatttgcctgaatggcattgcctgaaattcagtcactgacccagtattgtgaaattgatgtcttctgtggcattagtgagggtactgtgtgactgatgttatggaatatgccagatgttttcccatctgttttaatgatagaaatcccaggtttcaagtctcactgtctttttgtgattctgtatataatgtgtttatcaagcacattatgacccctgagaattattaaccacaaataaacacgtttcattttgtatagcatgtggtgccctttcaaggagaagcttcatataaattggaatatgtgaagtacaaagataaagctcttatgaaaaatcatgcagaatttattctaacaaaatttgatatactctataagcacaaaattatatctgttctttgattccaggcctttccactgaattctttagtgaacttgaaaaaatctctttatgtttctttatacttgttacattaagtttaaaacaggcatctaccaatgagaatagcaaaataaacaagttccttaaataaactcaaaatactgccatggtcaaattgagtaaataaaaaagaaatctgagacggtgttatgtcgtataggctgaaagaatggtttgagtgccacagttagtcgtaaacaacaactaatgatgatttaagctttaaagcttatgaaaacaacagatgtaaacagtcacatacttacctgtaataactacattgtacagacactgaagccacctgtaaaaatggttcgaaaaagatatctgcatttcccaaatatttctccaacctggtgcaggaaagtaagtcaaaatcaattatatgaagtaaaaattttgtccaacaaaataaaattgttccattttaatagaaacatctgacctaggttgattcaaaaagtgattaaatatttatcaaatgtacatactgtctttgaagacaataactacagcttcataaaacgtgaaatatttttaaccaatttatttcttcccccacataattgaaaataaacactcttaccacttaagcatgaaaaaaaagttcgttgttttgccattaggctactatttgtaaaatatttatctcttgcagattaa

SEQ ID NO: 139417 - DNA, 1506 bp, Homo sapiens
aatgtttcttgttaaggtctgcttattagtttttctttattgggtattttttgagatagcatctcactctgttacccaggctggagtacagtggtgacgtgatcacagctgactgcagcctcgacatccggggctcaagtgatccacccgcctcagcttcctgagtagttgggactacagacgtgcaccagcaagcccgactaatttttagtttttttgtagagacaaggtctccctaggcttcccaggctggtctccaactcttgggttccagcagttcttctgcctcggcctcccaaagtgctggaatttataggtgtgagccaccacaccgagtcttgttctatagtttttgaattaggttcttctgaatatttttttctttacaaagttttgagaactacaccatctgtttttgctaccttcatttggatattggggatgtatttccagttgctctcatgatgcatggatttgatatgatgaaacactaatactacaaaaaggatgcatgcaaaataatatcttaagttaatatagtccctattcaatttacggctttttgttgaatatgtagtattaatactggaaactaaaacctgatcgtgaatataatattacaattttaacactgtcacatgttatttgtaattcatttatcagtttggtctttatattatgtatgaagcaacatttggttcttgcagaggaaaaaatttaactgtgacttacaattccccaatcacattagaatgcattttccgatgaatataagactaaaatatgcttatttcacctgcacattcttgattccttgtttaatttaatattttgtaatttggaagtaaacctgcagcatctggttattcccagtctcccatccaagcactaaccaggctagaccttgcttagctcacaagatcagatgagatggggcacattcaggatggtgtgaccatagattaagaagctatttatttaccaagttaacggttcatagattaatgtgctccccaagtgctctaggatatacaacatatggccaagagaaaaagccaatttagggccagaggaagaaatatcgtatgcatcatagtaatcaatgatggtacaaaaaataggatcattttgttaaggcttcattaaggggtacatattgaaagtgtagccttcagttgtatttcaagaacatttcatgaactcctgttccttataaagtagcaaggatatttacctgtcacataagaatacctcctcatttcactttattaactgatagtttctttataaagactttatgaaagaacttggatttacttctcttgcttaagtcatgaaagtaacaggatataattaaaccaacagtgcctaaacagatgatgcaaatgtttgggcttggtgcgatcagccttatcctggtatgtctgcccatttattgccgctctcttttctggaggaggtaggtgaacataaacttttatttgctcgttgctaagtatacatgag

SEQ ID NO: 139418 - DNA, 1755 bp, Homo sapiens
ttatacaaaatgccaatggactactagcatgatgcttccaagctttttttttttttttatagctccccacctatggggacagagtgggtatagaggtacagagcacagtcaggactagagtgaggtgagtgaagcacttagagcacaaagttaagggaagcactcactctcaggtttgtgcgcgtgcaaggtcagcattgtcactaccctgagaataagtacctccttaaattctctgataaagacaaggtgcctgttgaaggttaagcatgttttatgtttttattgaagttaatgtggaagtagtagttgagttaccagaatatggtttagatttcgcaagaagagttagactatatacactgccttactttggatgaagatcatcgaagtgattggcagtaggagtggaatttttggcccttccttcttctcttcaaaggttgattttgtattaaaaaaataaaccatgaataacaataaagtaacatttgctagaaattggtggctaggaatataccatgaaatttagagagtttctaggattataagtttggtatgataacttcattatggtccctgtgttatacctctgcaaaggaattttatgggggtgttcaggtcccctggatttttttttctctaaaatgaaatccaaaggattgtcctctgatcctaatatatttccttctttctacatagtacagactgcttgagaaacaatgtgaataagtgtatatattggatactatacattttggtttactatgttttatttatttattttactattttgtgcaagagcagtatgctccttcggtcatcttgagctgactatcatgacccttggagcaggtagcagattcatcttgctgcttagctgaatttccaggaacaatgattgagagtggatgggcactttcagcctattgtggtaggctgattttagaggcaaggagaataattgtgtaagaacggggaaatcccatccctgatatcaaacaaggagccaagtgcaggacatagtcagcttttgcagggcaagatatctccttagaacgatttccttaactcactttctgttctccatttcaaagaataaagagatagataaaatattagggtaggtaaaataaataacccataaaagagaaatagacacagcagtaaaatcaatatgtggtggcttaaaaaggaaaagaaagaagccaaacacaattgtttgtccaaatcagaggtaccaaaagctattatgactatctgcagtaatgtgatttgggcctcttttggaagacctttttttgctctttcatcattggaagatacccttaagctcctcctcctgctaaatcctgtcttaaacattaaataactgagaattcctttaagaaagagctgtcatagctctcctcttggccttcggttgcaagccaaaacaaacaatgttttggtattccccaacctctgcaatttggacagtgccttttttaaggatcacctaaggagccagcaactgacaagagttggagagcttaaaaaatgagaagcactttgggaggccaaggcgggcagatcacgaggtcaggagttcgagaccagcctgaacaacatggtgaaaccctgtctctactaacaatacaaaaattagccgggcatggtgacatgcgcctgtaatcccagctactcaggaggctgaggcaggagaatcgcttgaacccgggaggcggcagttacagtgagccgagatcgcgtcac

SEQ ID NO: 139419 - DNA, 1393 bp, Homo sapiens
aggggagaggaattctaaggggaagagaaaaagggaggtggctgaattgttcttattaacagctattactgtagccagcgacagtagtctcaagtgcagtttctaattcagtttctaatctttatctgtttttagataaagtttaaatctgtgtgtatatgccatttaaacatctgtggattatatagtgatatgatacttgagtgtgtctgtagctttggtaaggtggaaaatttaaacataataccatgcctgttaaattcagatgaagtgcattttcatgttctttttcttcctatcagattgaatttgtaactttgaattaagacaaaattcagaactcagtctgaaaatgacaaaactgtgttttctttcaactaataaaatgtctatttttttttgaagattgtagatcatctgatacacagatgatgtaaaaagcacatcccccatacactttcaatgttgctacttgccagatggctgttactgaaaatttctacatttagaccaatcctgctgcatgattccctgtattataatctggttttcattatgccgctagtcttagtgccacttattttcttacaatgggaggtaaagaactgggaataaatgtgtcaaaaactgcctaaaaatcatcaccctttgaatttaaaaaatagacatttacattttcaatttcccatgtttgcatatctcattatactgtacaatataattagtaatgttattttgaaaagctttatgcagtaattagcgaactactggaaagtttgaagttcctaggattatatacatctggattcagaggaaggaaataaaatctataaattttgaaaagtatgactaggctgtaagaactttgataaaatatgtcagatgagaatgtgagcaaactggaactctgttctagcatgagtcactataggtttgaaattcgtataaagctggtacttcttggacgctgttcatggtaatttaattactgaaataataagagaacctcattatgcggatcatatgtctgaggtgttctcattgcaaggactccaaggacagcattttagagaactctggcatagtaggtactattaaaaagaacattctgttgccaagtaactaataacttcattgcaaaatgaagtgtccttttctcaattcccatttaatttgatctttttgtcacagagtacactgttgactgctcccttcttgaaattttccccccttggatttcattgttcctcttacaattttgatccatctcagtctgcttttctttgttcacccaaatgtggttgtttcccaaagccttactcccatttatcagaaaatgttagaaatatatagtaggaagaacattctaaaagatctgcgttctcattctgct

SEQ ID NO: 139420 - DNA, 1077 bp, Homo sapiens
agtgatttctttagtttcccaggctagaaccttagagtctttggtgactatttcttctcatttatcctcaatatataatcttttcacttactctccttgtcattgtgttctgttttgttttgttcttctttggaatgagtctggaatttgccccttctcccattttattgtaatttagtaccagccttgagtgccttttcccattctaggcaagtggcttcaggagaggagcaaaagggaactaagggtagcatctaaagagcgaaggcaggtttcagagctgagaggtcataatgatatatctaatccaagagattcttataggagagacaccatctgagatggggccgcaagtggggcttggaggatggctaggaggtgggttccagagaggtttcctggtacttaaataggaatgtatagcattggccttaggtaaagaggaattaaggatacctgccaaaccagtttggacatatacctggactcctaatctactctccctctaatccatcctgcaatgtcttgccagactcatcttcctgaaatatctctatttcatttcattatatcattcaagaacttctaatgctttcaagaatatctgtgttccaggccttgtgttaggtgctgtgaaggacaaagaagcaaatcagattatgctctgtgctctcaaggaacacacatagtctgtgtaataagggacatatacaagtatccaaagtagaaaatcattgtccgtaaaagaggtacagataaaaagttagcatgtagatggcttctacggaagtaaacttgggaatttttttttttaagacaagttctcgctctgtcacccaggttggagtgcagtggcacaatcacggcttactgcagcctcgacttcccgggctccggcaatcctcccacctcagcctcccgagtacccaggaccacaggcgtgtgccaccacacccaactaatttttgtatatttggtagaaacagagcttcaccatgttgcccaggctggtctcaaactcctgagctcaaggaatccacctgccttggcctcctgaagtgctgggattacagacag

SEQ ID NO: 139421 - DNA, 1251 bp, Homo sapiens
ggtacgagattgtatacccaatgacaacaggagtaagtgaaggtgctttgaaaattgtaaatgctaatacaatgtgagccattactgtgtagatttgaagttcataggaggaaggaatccctctaaactaggagtggaagagctggcttcctagacaagataatatctaaacttaccattaaagagtgggtaacattgatgtcagcacagggaagtgggagagcatttctgttacagatggtcacataatcaaaatgactgtatagagaataataatgatggttatgatgatcaatatgagcaagccaagtggaataatttctatcggatttattaaatctggtgagttaaaaatatcaggtgggaaagtatagttatctgggcaaatatttttttccttataaccctcccattgttattctatcactaatgagaaataaggtttcacttgaactttttatgttacagcgaaccggccgatgatttacaaaggcaggacaacagagttgtaacgggtttgaagaaacaaagaaggaagcgaaagaggaagtctgaaatgttacagaaagcagcaagaggacgtgaggaacatggtgacgagtagcaagagaccaaaggtaattgacaataggatataaagttgaagtgctcaatctctgattcttgttagctttatatttctaccatcatcttggcttgactgacacattttttttaaccacacaaatgtttggatcacaggagggccagcttctgaacacatatttatcactagagatattgagatggtaggaaaatggataagaaatgtgccaaattgttttgagtgccacattatatggtatacacaggtcagcttttcagagggagaaaagaagttgatcctgcccactctgactctatggctccctgatagacacccttggtaaataatgaaggccacagtcctcatatgtgaccacatcacatatccaggggaaggagaatggccttaggagtctgacagagatgagattgaatcctggatcttacctgttagtctcagctacctgttcttcaaacctgcacgatgtagtgttagaagaggttgagagagggatcccagaatcatacactagggactactttgtacaggttatacttgtacagggttatagatccctagccttgacttgggtctcctcctcccaaaataactgtgaagggacaagtaagaataaaatggttggtgagaaacaaagctgtatctca

SEQ ID NO: 139422 - DNA, 1001 bp, Homo sapiens
tttatctcagaagaaaaaaaagaaaatctttatataaggtatcatatatatatatgggatacatatttacttaaggtaacacataaatatgtattactataatgcctgtgtattattattcatataaatatattaccttgtattagtttaatgcaatacatgtgtgcatatgtacacatgtacacacacatatatacatatgtaacattataactagactaacaaaacttggtttctgtggaccattcactgagacatggaagttaactttgttattcagaaattatctctgtaatgatatttgctctaatctgttttatatgtatgcctcacagtaacagaagatgatgtactggcaaactgaaaatacataagttaatcataacattcactatatagaatttgataattttgttgcagggacttcttttatgacaaagtgcgatatgtgaataccagccttttcaagttgtttaaccctactttacttttctcccatagcattattttcccctcaagacaacagaaaccattcagagcagaggggactgtctcagccatgcaaacctcatggagcattttggaaagttaaaaattgattcttatttttgtcatgtttactttcaaacatgaaataaaattgagttctgttttcatgcatcaaaccagaatctgaattctttttattaaaaacagttcctacagaatctttaaaaacatgcctaaaacaccggtggcattcagatcctaaaaagttacatgatttttgcaacttgggttattgtatcaacatatacttctgttggtactaaataagacagatgttccatattgttattcacctgtcagcaagcagagagaaaaaccccaatgatcatatgttgcagtgtgtgatactttgtttattttgaggaaaagaggtgaagataatttgtagggtttttttattttataaattataatgttatttttcccactataaaagtaaaatacacttacag

SEQ ID NO: 139423 - DNA, 1029 bp, Homo sapiens
gtcatcatgtataccaaatgatcaccagagttcagtaaacaagtgtttgctttgaaagttatttcccaagaatctgatattgctgctctaaattttcagagctgtattcagcaaaaacaaaataaaaagagcaacaaaaaagtttgttgtgtagaaataaataataaaataacacataagaaaacaattcctttagaacaagcttgtccaacctgcagcccatgggctccacgtggcctaggacggctttgaatgctacccaacacaaatttgtaaactttcttaaaacgttacaagagttttttttgcaaatttttttaaagctcatcagctatctttagtgttagtgtattttatgtgtggcccaattcttcttcttccagtatggcccagggaagccaaaagattggacactcctgctttaaaacctaatattgaaattttagtgaagccatttgtaatctataaagaagataagcatagtctgaagtaatactttgaaagcaatagagaagaattatctgcaactattctttaacagattagaagttaggtttcagggtacacagacaaagattatcattaagttgtcaaagagtgtgagcttagagtgactgttgaacagttagtgctgtagaataaatgctggaccagagatgagaattgaggcaatcgaaggttgttattattaacgattaaatgccaaagggactcacaagagtgggaaggaaataaggttgttcagaatgctgtctccaacaccagtgcctaatgcagtaccaaatcatgtctgacatggatgtttaagccctgcaagtcatagatgggtagataataagtgtgtcactaatgtacaagcattaatggtcacagagtcatttccctcaagccatgaccatatctgttccaaatgaaaagatactagctaaatgagaagctctctgatgaagagcctgaatttaacttgactagggtgactgctttaagccagaggtgctagacaatctccttacttccacagacacaggg

SEQ ID NO: 139424 - DNA, 1723 bp, Homo sapiens
ctgcaaaatattggtttcattttaataggaaattgtgccctagtttgggaagagcctcatgagatacaacttccatgacttaatcctaaaaacttattcacttgaagtacttcctaagggaaacttcctaactacttcctaagggaaaaatctgtctctgcctgtagatactatacaaggaggtaaaatatctacaattttgaaggcaggtacccaatttcacataagaaaacaaggttttggttagatccctaaagcatatgaatctgccctcaactagcaacatagaaatccctggttccaggcttcctctgagtggacaatctcaagctatctgctattctgtgcttattggaagcccaactgcaagaagtgatggttagagaatagtaatatgggctgacgcctcactcgatttcccacagggctgcgcaggtttcccctttctgcgaatggaccactggaggggttcaaagattccagttctaatatgggaatgagcctctttgatctcttccggggctttttcggctttcctggacctcagagctacagagatcccttttttggagggatgactcgagatgaagatgatgatgaggaagaagaggaagaagggggctcatggggctgtgggaacccaaggttcgataatcctcagcatcccgcccctccccgccgccccccctccgcccccacaacaaggaatttggctttgacttcagcttcagcccaggaggagggatacgtttccacgataacttcggctttgatgacctagtacaagatttcaatagcatcttcagcaatatgggggcctggaccttgccttcccatcctcctgaacttccaggttctgagtcagagacacctggtgagagactgcgggagggacaggcacttcgagaatcaatgcttaagtatccagatagtcaccagcccaggatctttgagggggtcttggagagtgatgcaagaagtgaatcccccaaaccagcaccagattgaggctcccagagaccatttcatgggtttgatgacgtatggcctgtggacccccatcctagaaccagagaggacaatgatcttgattcccgggtttcccaggagcgtcttggcccggttctacagccccagcccagatctacttcaagagcatctctgtgaccaaaatcactaagccagatgggatagtggaggagcgctggactgtggtggacagtgagggccagacagagaccgcagtaacccaacacgaagcagatagcagtcctaggatgatccaaaatcaccaagacctccagctctggatgatgccttctccatcctggacttattcctaggatgctggttccggtcccggtagccttgttaaccctcagaggccttcaagtcctttccacctctcacccattgcccaccatcaataagcttagcttctcctcttgccccctcagggtcttggctatgtggaatagtgaattgggggcatgtcagtttgtcactcacccaaactgaccaataaaacctttatttatgctaaaaaagagaataataatatgaatatttatgactaacatttattgagtgcttactatatacatttaaagatccaatgcattatttcattcaatccttagaaaactatcagtaggtattatattttttctcatgctatagataagaaggcagatgaccacagaggttaagaagaaaacaaatg

SEQ ID NO: 139425 - DNA, 1804 bp, Homo sapiens
agaatgtgattttgattatggattgcttactttatgggatgctgtttttcaaacatacctgtgtattttgcttcatttgaaaaataaaatcagctaatgtttcaaagtaatcttcgatttggttcttcagtaggtacgttctcttatatgaaggtgtaaaagccacactttgaggattaagctaaggaaacaagctttgttttcattacaaaatcaaaatcactcatctgtttatttttccaatgcttcgtttgttggagaaataaaagacattacttccatcctatggagaacagtttgttttgttagatttccaaataatagttctctgcatcatctaccatcttcaatgaaaaccagatctcagtagcagatactggttcacttggtgacctttattaaaccattttcctggagtcagtttttgtgttttgtaggcaacgtatctcctggaaataaatagctttgaaatggtttcttttttgtataagtaaaaaataatatgctacttgttttgtagtggtgctgaaattgaaatctcagctttaacaatcattggaagaagttgcttgctaaaattgtgatgtcttcttggtgtttgggtttctagtatggtttgatcaaaccaaccaagcagatggaatgtgttgttataaggtcattttaacctgtagactacggcaatatgtacatgacaacctgactatctgttgaacaatgaaaaatgcaattacgtaggctttatttcccccttcaggatgtcagccaacaaattttttaatgaattaattttccaaaggactgattgttttcatgccaggtcggcacaaccacagtgactaaattagactcagtgtgatggatgtttctgatgaagtgccgtggagaggtctcatcaatttgctattatttatttgctgccaaagtgcttggctttggtgtgtagacgttaatcaggtcgtagaagctagagttttaaggctggagggcccctttggatcatgtgatccaaactcctcattgtacagataaggagactgaggcccaggatgggaaaatgacttgcccaaggacatccagtcagtaattggcaaagccgggtcaggagcccttgtaccctggttcagtgtttgtcatctctcaagaactgtttgtattgcctacctactctgtgcccaacactctgctagtcagtcatttttagggagagatgaaaggaccgtagaagatgacctctggcctcacagaatttacattggaaagtataattagaattagggaaatactatgacatggactgtaagtaaaacaggaattctgggagagagagagaatgcaagctaagtaggcaaaacagtcctggtcaaggcccatgaaactcttttattactattagtgcacttcagagtgaaatggaaatccagaaatttttattgtttaggggacccggagcattgaatactcaacataagacaattgactttggaccctgaattatctggtttgacagtagctcacattcatcacataattgcctgagtcctcttttgctgtgtgaatggagtattctcattaacacagaccaacatttgctgagggacaaccacaaaagtctcccaagaagagctttggaaacatttgtgcaaacattcttcaaagaaataccaaatgaaaatgtgttttttttctgaaataattgaaacaagtgtttgtaaattggtacaattgctagcaaaatggccatttttcaaaagaagggtatactgtagctcttgagatgttcacaaatacattgtttcttttg

SEQ ID NO: 139426 - DNA, 1143 bp, Homo sapiens
ctaggatagatgctatactagtggcaagccctgcttgtgcttgggctctatagtagactgggctaatgaggactttaccactcatccttagtatttacaaattgggtctaagttcattatcaaatatgaggcatgactttccagatatctactccaacaagagacacacaagtctgttcctctttggtgtaagtggcagattctgatcttgggaggaaggtatactggttcaaaaacctgaacctaattcaaacttgacaagaatgtgagctcattaagggtggagagttttgttggttttattcactgctgacactgcaatgcttagaacagtgtgtggtgcacagtaggtgctcagttattttttggtgaataggtagatggaatgatagacaaaaacctgcttaatactttgtgtgattaaatttgtgaagagatagctcaagaggtgtaagaatgaggaccaagagaagtgctaaaatcacaatgagcagacaggtgggtacaggtaggtgtgttgccttgccttctgtacatacttttctgaaataggatgcttatagaaatgttataaattaaatgttctttatgtgcatcttacttgccaggaataccgtagggaagtctttgttgatgagcaaaatctctcccaaacagccctaaacttatcagatttgtgtacagcattttgagattttagatttttgtgtacagcattttcttgtcatgaggtatacctacatttaatatctgcaacagtgctttaagggtaattgggcagccttaaaaaaaaaaggtgtagtaacttgttaccatccctgaattgtagctttcatctagtacaaaggggggataacagacttcaacatttgctgagtatttttctccgcgcttttgtaacgttgtctcctcttagctagatgcccgtttgcttaatagttcccgctttggaggctaacctgggatttgaattttcctaacatatatttttacattgaacacattttctatttatgcctctggaggattcaaattacaatttcatcccaaggatgtgcagaaaagtttccacacgtgctgattttaaagaaatctataagataatttggtagggaaagaggattagcatttacagagcattat

SEQ ID NO: 139427 - DNA, 1050 bp, Homo sapiens
aatttctcagaatattcccatcttaaagaggatgtggagacaacatttgaatggatgacattatgtgtgtttcagaagccaggtgtaaagagcacttttccatacattttatatctgagttaccaatgcctcatcttccagagagcaggcagtaggcggcatgtgtgtcctgggacactgagcttgccttcctttactaagggctgtaactgccacatcaccatttggagtcatgacttgtaaagtactcagtcttatttgttgacaactgttgtgggcacctctcccttttaagtgttctaaaggaacaagttttgagaaattaggtcagttgaattttctaatatttttggaatgtaaattaactgtacaaaaagcttcaactgcagttgtaattgtagcttgttaaaaatgaaaaacagagatgtcagaattctattaggaaaaaataattatagtaatattttcctgctatattgaccctgctaattgtataaaagaaagtacattcaaaatttaacttatgtgtacgtgtgtgtgtgtgcatgtgcaggagagagagagaggtgttagagccaccagtttgctgaagtaataactttccttttcttcttttctataaccaagcataatatataaagagagctttgacataacatttaaagtctaaactccagccaatgtcaatattatatagcaaatattgactttaatcaaaaaggtctgactgatgttacagcttataagaacaaacaaaattgtaacacttatcattaaattaccactatagaaatatgtagatgataatctcagcccagtgaatgagctgattctcaatagataatggtcccattagtcagatattatcatttagcttatctatattacttagaaatagtttatatttaaataaccagaatagaagacttcataaatacacattaggttgtgggctatagatttcaacactatctatctatagataaagctataaatagatgaatattgaatatagtaatttaacacttaagtaattttatagtatcatta

SEQ ID NO: 139428 - DNA, 1055 bp, Homo sapiens
atcatagtataatagctttgactcaataaagtgatcttccgtgagcaagaagatcagttggcagaaaaggaaaaggaaatgtggcacaaaaaacttggcactccactataagaaataactttacctttgttaattcatttagtcggtggattcttattttatttaatgagttataatccattactatcatcatttatttatttattgctaaaatttgaggtaattttagattcacacatagttgcaagaaagaatatacagaagtcctgtgtacttttatccagttttccacagtggtaatatcttgcgaaactatagtacaatacaatcttgttttttttttttttttttttttgatgcacaaattttcccagacttgaccagtgggagctgtttctagctggctcctatgtccttttgattatgaatcacttccttaatttctggaacaaaatacttcaggttcacctggtactttctctgcttcagccctggattcatctctcttagaagcctaatttcctttattggaaaatggtacttatagaacaagatatagaacaaaatggtacttatagaaaaggggataggtatacctttactaccggagtgccattatttctaggccatctcagcaaatagagctaggaaatatatacacgtacatgcacatacacatacatgaacacacatctatctctatttctatatctgttcatctgtatatacagcatattaaaatatcatgatgttataatgatctcaccaattccaataaaacaccacattccagtctttccccttttcttaccggtaactcccttctctaaaattgagaaatttagctcacatgatccacaatatacttagttatttagtcaatccaaatgtgctaacccctagcactgtgaaaaatcagttcaggtaagagtcatcaatggatcataaaagcagtgggtgaaagtttgaggagtaatgaaatatttacataatttctaagtatttccctacaaaatatttattaattgcaaggggaagaagtagcaaattggcag

SEQ ID NO: 139429 - DNA, 1129 bp, Homo sapiens
tcttctaacctatttgtgtagatatgttgcacatataattgttgctacctattgcaaggtccaaatgggtaaaggatacacattttgatcttctatactaggatattcttgagacctcctaaaagggagcatgaagaactgaggcttggctggctgctgggcagaccactttgcttagcagccatccatgcagacaggtgcccacaggctgaagggctgtcaggggaaggcagtcacagcaaggaaggaagtgggataggaactgaaacaaagattatttctcctcatatatttatgagttcctctaggtgggctagagcctagagcgaggagaaactcggtatgtattgttaaacagaatggattaaaaggaaggggactgtggcttaagaattcattgagcagtctatcttttgggtcatccccgtcttcatcacaagtaagtccacacctggaaatggaacttttccctccaaaccatagagttgatcaccagggggagagctgtaatgaaatctgtttctgaaaccagttggccttactgcttctgtgtgagttggtgttagcaaatggttgcatgaaaccttcctgatgacttaccatcctctagagggcagagccaggactggatccgggcctcctaaattgtagaccctggtattcaaaagggggtccatggaacagcagcatcgacctctcttggtataacttgttggaaatgcccaatgtcaggtgccagccaaacttcctgaatctgagtctgcattgtcaaaagatccccagggaatgcatatgcacaataaagactaaagagccctgctgataggcttggttcattgaaatgtgaatcttatgtgcaatgactaaagattgtgttcttttgccttacttttacaaaagaagaagggaactgatcttgattggaccccctaccctgtgccagtaactgaatgtgcctggcatcctatatttctgcttgttcaaccttcacaactaccctgggagataagcactgtcttcctaatcttatagacaaggaattctaagctgaaaaacaaagtgacttgcccaaggccacagggtaattgtcaaggctggggtttgaaccctagtttgtgtgatttcaaag

SEQ ID NO: 139430 - DNA, 1054 bp, Homo sapiens
agggagaaagggtgatgtggtaggacatggttcagaatatgaactgagaataccatcttaattagaggtctccaattttttctttgcaaaaatatgcttacattattattataacactgtttcagtgttatacaaaaataatgattatctattattatttaggtaaggttatataaattattatttagataagatactgttatctctctttttgtagtctgctatattttgaacactcttcacaccattaaatattctacgacagtacatttctgttcatgctgatcaaattagattgtggtaatctactagatgtggtttgtctctgccattgtatgtgaaactgaaggcctaaggttaagacttgtttatctctttctgcatcccgatggctcagcatagagtaggcttcaggaaatatacatttaatgaataaataagtcaatagataagtgacctttgattcctactatgtgcatattattgaattagatttactttgtgattgcttggaagaatttacaaagatgagtaactgacaatgtttcaaccctcaagggactagtgatatatttagaagctgacaaccggttgatgattgagatgttgcttttcactctgtttttatctctctgtctcgctcatataactctatcacttagctatgcagtgtttcttgggctttgatagcagggtaaccacaaaagaagagatcatacttgctaaaaactcccaggtttggagtaaaaccaagacatttcctattgggatgagttcctgtattaaaacagctaaaaatgaactatgatttctattgttttctaaggcatgattgctgtggctggaaatcccagagttaatacttaggaccctcttgacagtcactttctgactaaaactttatagttcttaaagacttccaatttaatttaggattcctaatgatcttcattgttgttttttctattataaggctgtagtctataaatctggaagctgttcagcatgcactaaaaatgtcaatatgtttcaaataagtactgttgcatctcat

SEQ ID NO: 139431 - DNA, 1018 bp, Homo sapiens
cctagttgcttctttcatactttataccaaactcaagagaagaaaagacagtaactttcctctttgcttgcatgggattatatcattatttgtctgtgtgcctgtctctctcctctagcctgtcagcagttcgaggcaattccttatgtactcattcaaaagatggtcatttatctaacacctactagacctgagcatattgcttaatgttgagaactgtcctctccaattcatttcaggactcgcttagtcctgggctgtttctggatgtatcacacacatagtgcatcagttaaacatggagactctggagtcagcctgcctgggctggattcccaactctgctggaatttgctttgtggccttgggcgggttatttcccctctatggccctcagtttcctcatctgttaatgaggataatagtatcaacctcataaccttgttgtgagaagtaaattagcccatgtaaattgcttagaacagtgcctgaatagacactcaaacatgttagttcttggtgcagctataagaattgctattactatgttacatttcaatcaaattcaagttgtctgggtggtccatggtagtgctctgttctgattcccagggtctataattaaagaaggtggattcttagacaactaaaactaggtaggtggccttgaggaagccaggagaggggaaggggacctgaatactctttaagtggatattttgcagtctactatttagggagtacagatctctgagctagtacctctgggtgcttgccaagattgcttttgctgagcttgtaagtagaccatgagctagaatggaacaggaactaggggctccctagagagtaaaactaagcttgcaagacagattatatagattcttagctcactttggttaattttctagttgtttttctcaagcctttagtaaagtcttacttaaatgctccagccatgtctccgttaagctgtgaagtagtaaagtgcaaagtcctatgtccatactctagccag

SEQ ID NO: 139432 - DNA, 3062 bp, Homo sapiens
ctgtatactaaaaagtggttacgatggtaaatgtcatggtgtgtgtatttgatcgtaataaaatgcaaagataactctaatgcagacatccagaagggagtaatgtgtggggtgatcctgtgggagtcagaatatcctgttcctcaacagactcttttacctagtggttgtagccttaattgatgatccttgtctgagtcagttattaaatcggtggttccaaaattcaggttgttttaaaaagcgccaacagcctcgtggggccctaattttgcatcctgctatttgattggatgagtaattaatgcagggtgaggtgccgaggtggtgtttctaaacgtctgttgctaaagataaatgttgtaaattaaaaaaagaaaacatatggagcccagacaggttcctttactgctcctgcctggccatggcaggcttttataatgtaacccattctgctctgtcgcttcctgtttcaggcaggcaatccatggaccttgtggaacttgtgtctctttttcccacgctggctggacttgcaggactgcaggttccacctcgctgccccgttccttcatttcacgttgagctgtgcagagaaggcaagaaccttctgaagcattttcgattccgtgacttggaagaggatccgtacctccctggtaatccccgtgaactgattgcctatagccagtatccccggccttcagacatccctcagtggaattctgacaagccgagtttaaaagatataaagatcatgggctattccatacgcaccatagactataggtatactgtgtgggttggcttcaatcctgatgaatttctagctaacttttctgacatccatgcaggggaactgtattttgtggattctgacccattgcaggatcacaatatgtataatgattcccaaggtggagatcttttccagttgttgatgccttgagttttgccaaccatggatggcaaatgtgatgtgctcccttccagctggtgagaggaggagttagagctggtcgttttgtgattacccataatattggaagcagcctgagggctagttaatccaaacatgcatcaacaatttggcctgagaatatgtaacagccaaaccttttcgtttagtctttattaaaatttataattggtaattggaccagttttttttttaatttccctctttttaaaacagttacggcttatttactgaataaatacaaagcaaacaaactcaagttatgtcatacctttggatacgaagaccatacataataaccaaacataacattatacacaaagaatactttcattatttgtggaatttagtgcatttcaaaaagtaatcatatatcaaactaggcaccacactaagttcctgattattttgtttataatttaataatatatcttatgagccctatatattcaaaatattatgttaacatgtaatccatgtttctttttcaaatctaaagttaaaaaaaaatagcagaagccagtgtcttaaagtctatcttttgtttctaagaccatgggatttcataatctcaagataaaatatgtatgaagtaattaatgtagaatttttacaccaaataataaataatgcttaataaactagagatatgagatgtgtaggaaatttggttaaacttttttcagatactttctggcccaaataataatttgttagcaaataatatgacccttgaactcaatggccatctattaaaagactgttgttcacactggaaaacatttaaagatgtgactatatccatgggtggattgaatcactcaaaatatattagtatccttctttagggatggttggttacagacatgtatttattcaggaggcagaaaatattccattttaattgcttattaaagaaaacattaaattctaaattattttgaggactgtgaagacttttcattagtgtaatattaggtcattgtcaatctcccagaatgtagttctatattctctaaatatgaaagtatccagaaaggccagtggtagtaaaaagcttagtgtatataatctcaaaagggatggaatatttacagctcatatttataacatgttgaatcttctcagttatcagtagtcatcagaagtgtcaatagctttctaaataaatattaaatatctactgtcctgtagtgaaggagtaatttttagtaattttctctttacaaagtctccagtgtttccaggtaaatatttgtgaaacaaaatacagcaaactacattgttacttcagtgtattgttgccaaaaatgacaagatattatattaaaatcagtaaattttagacagattttaaaaattaattagcctacaatagaggttatatggtaacacggtgatcttctaagcagttaagtgactgactgttctggcaacaacgacttctccgtgactgaagggccctgttcatttcctgatcctgaagctcgtctctcttttgagcctccgcttgctttggtcgatggtttccctcagctttttctttgctgttcttcatcctcgttgttgctgtcatcatgttcactgtggcttttacaatacagcctgtaaattccttatgacatagttcagtgcatttggctttatcgcctgctccacagttctttacctttacttggcttagagaaactgtatctttgttgcttcatataacctttccccaaccccactaagctggacataacttattagtggtcctcccgtcactttatttgtagaaatctctctttcacatgagcaggggttctttcatgtggtttagctgacagcagaactagtgattctagacattttgcatggccctcattcagtggctcacaaacatgagggagcatcagaactacttgaggggcttgttaaaacccagtgcgttagaagtcggatgcggtggctcacacctgtaatcccagcactttgggaggcccaggcaggcggatcacttgaggttaggagttcaagaccagcctggccaacatggtgaaaccccgtctctactaaaaatacaaaagttagccgggtgtgg

SEQ ID NO: 139433 - DNA, 1046 bp, Homo sapiens
tcgtcctccccgagagagtggagaggtcgagcagtggggatgcccctcaggccccggggcttactgactggggcgggtgtcagggggaactccctctctttctgagctccactgagctatctgaaagtccccaccatactccccagtactgacagccagagggaggaacggctcaccagaatcattgggcatctctgatgggcatcaagtctgctttgattattgatgagtgggtaagagggtcctctcaacttggggtctccttgggaaagcactgtcaactcagaacaggtttcagccctgttctggagaccacaggccctggaaggctgggacatcatttgcagccccagcgtcatctattagacggagccagcaaggtctcatgctgtgcggtacatttcaacactttctcaaatttacccgtggcagcttttggtgtgtttggttatttttataacactactcactgtacaatttctgtcatgcacattttttgtatcaaaaagggtgctgtaactttaaaagactgggtatttccaacttggaatattcaaaccatcttttgcaagggatgttttaaataggcatgaagggttgtttttaattgaggttaaggatctgaaatgagaggttttggtttaccctatctatggtatgtcttaaaaatcaacgaagatgtccttgtcttttttgaatttgccgagtgtgttgcagttccacagctcactgttaggtggcacataccccaaactgaaaacctgacctcgtagggcatgagtcaaaagacaggtaggcacaggacagggcagtggtgacactacagctttcagggttcccagcctgtcaagaatgagcatgtcttagcaggggaggaacgcatgtgtgggaaccgccacagagtcctacgttaggtatatgttgctagtagtttgttaagatatttgagtttgggaatttaattattttttcttttttaaaggtttcctcatgaggacaaatacctgattttgaataaagcagcattcagttgaaataaccctttc

SEQ ID NO: 139434 - DNA, 1081 bp, Homo sapiens
tttgagagcctctgctgtagagtattgtttaaagcaaacacagaacaaaaccactgcatacagatatcccttgctatccaaacttacttggcccctgagtttgcacaacaagagtttggttggtgagaggtgtacattcctcaaatgtatttgattcctgtttcactgagagtttggaaagcaatgcatccatctgtttgttttctaattttgtgtttctgggctcctgatggtgaagtggcttgaactggctctgaggctgcacctggatgctttattagtgatggtcacttaaaatgacccttcaaaatggactgtgtgccaggaagggcgctgattcatgtgtggtatcgcctttagtcctcatggggacttagtgaggtacctgctctctgttgtctaggtgaggaaactcaaggcatgggaggtgtgctgacttgtctgacagcacaaaattagtgctgggtggagccaattcatccccagggactgtaactccaaagccccatggttggatctgttggttcccagcagtgtgggttcgaattcatgttctacctcataccagctgcctaacctctgtcaagtcatgttacctccctgagcctccctgagttttcttctctataaaactgaaacaaggtaggtaaagtttttccatgataacacctactttagagattttcagcaagaaccaaagagagcatgtagaagtatctaggaccgtgtcggctgcacggagctatctccttcaagttctcttagtcccctccttacacacagtggacagcatgactcagagggcctccctgatgcctgcatgtgctggtctcagccctgtgttccccttgaactctggcctgctcactgtcctcttgtagctttggatgtccgcatccaagcccatctcactgcacccttgagactcagctctgggatctcttcagctccagccctctaactcagctctacatgagccagtgacctcaggggccacactcaggagtttgttgcctgctccttccgagtcaccatactgaccacaacctcttctcctagcacttcccttgctctacctcac

SEQ ID NO: 139435 - DNA, 1026 bp, Homo sapiens
agccacatttccatgttcaattggccatttgtatatcatctttggagaaatgtctatccaaatcctttgcccatttttaattggcattttttaattgttgaattagagatggatttttttttataattagtctatcggggtttcttttaattagttatgatctggagaaagagtattagtagcaagaaaccaagtgctagtggatttctggcccctgcctggaaaacaagaaacaccttttctgtcttagttctacttctgatgtctctgttcagtctgagtgactaacacgtgaagggctgattatgtgaacattaaatctgtgtgtgtagccttcatggcttcatttcttgcacttaaaaagctgatgttatattattttgttttgaaagacatgtcgagggccagatggagaactccatgccaacctgctttgccctgtggatgtgctggatgttcccgagggcaccttgcctgacaaacagagcactgagcaagccatacagttgttggaaaagatgaaaacgtcagccagtcctttcttcctggccgttgggtatcataagccacacatccccttcagataccccaaggtgaagagctggttgagggctgatccagcacagctgtgacagctgtgttgtttgttgagggagggatttgcacagggaaggtggctacatcctgccatcgccaggcaccatggttgcctgatgggcactagtgtcctcagtggagtaaagatgggatttagaggtcaaggccaagaacatgtaagaatcttgtaagaaatgcttggctttccgcttcactccactggagggtttgatttcctttccttgaacttattgagcagatgttgggttggatggtgagatcaccacagagtagtgaatcagagctggctgccaaagcctgtaataagggatggcccttccaaaacagccccagggaatgtgaaactctcttcaaaaactgcctgttccccctgagcctgtcaggttagatcatctaaacacaaagcac

SEQ ID NO: 139436 - DNA, 1030 bp, Homo sapiens
agcatagtctggaaaatggtagtggagaaaatctggttttccactcatgggaaagcttgaccttcaagggtggccttctccttgggtgcaaggtgcgccctggccctgatgtgttcatggcagccctggccagctttctcccagaacgggcgcttgcctggtgctcagaaggaaggggtgctgcagaagggcacccacaggtctgcaggctgggcctcaggtgagagctagccagggtggccctgctccctgaaccccctcatggctctgcccccagcaacactggccgctctgtgtgcctggggaggccattgcgtaggaggagataagcatctgctggtttcaggggctgattgcttcccttttctctcccggaagcagtctgttgcctaggtgacacccaaatcccagtgtctggtttgagctctgcatgactcagctaccaagctgtttgctaggagcctcgggagggcggttgcttggttacctaagagatggcagacatgttttgctgtggcgatgcttacctctgcttctgctccctaacagcaagcagtgtgcgccccgagccgcgtttctttcctcactggcaggagacctgacaccacccgcctgtacgacttcaactcctactggagggtgcacgctggaaacttctccaccatcccccagtacttcaaggagaatggctatgtgaccatgtcggtgggaaaagtctttcaccctggtactgctccatgtccagagtctgggttctcttggtttgtggtgtctgaatccagcattcccatcctggggatggggctgtctttgcagagccctcttctggctgggcgagtccctcgctagtcagtgcttcctttctaaaaaactgacttgtcaacccagccacgttttcacccaaagtgaaaaagggtagaaagagctttgcttcctttcagaaaccactgagggtgtgctgttgggtctttcagctcctcgggtggtagggaggacacaggctggggaggtggcagtgttgggtggagtc

SEQ ID NO: 139437 - DNA, 1071 bp, Homo sapiens
gggtactcaagccctgttcaggctttgtgactcaggagtctggataaagtatgttatgacattgtaggagtgaaacttcttgttacggaaagaaagttaacaggaaggtcagttgagcctcgtgtgtgaaataaaaaattcttatttttcagggtggtttggtatccgcaaagatttctgtcagtttctgcttgaaatcttcccatttctacgagaatatggaaacatttcctatgatctccatcacgaagataatgaagaaaccgaagagaccccagttccggagccccctaaaatcgcacccatgtttcgaaagaaggccagggtggtcattacccagagccctgggaagtatgtgctcccacctcccaaattaaatatcgaaatgccagattagatgccacttccggggacagagcttaagtggactgggacgcactctctccgccttcctctgccccctcgttcaccccgcagaccagaaccagtactggagctgggtctccaggtacgtccatctcatgccttgtttgcatccagcgcctatcagccactcaccacgacgggacgcggaagtggcaggtgacgggggtgtgtgccagcagatgcggatgccaggaagagtgtgagaacaggggtgggattaccgtctgtctgggaggggctccaggtacccctcttccccgtcagacccactgggagatggctgcttgccaggcccccagaaggaacatctgtctatacggtgctgaaatcccaatcaaaagtattgtttagaaatgtatttctccacagggctgacctcctgcagctcgctgagcactcccaggtcctcagcactcccaggtcgtggctggggcagtcagtaggaactgtaactatgtctctgatgcaccacgtgtttagacacagcacagtccttttttctgttcctactgtggaagtagtttctctttgggcatgctgacagcagtttttcatagcctcacggatgagccctttctacgggagtgactccatgcttgtatacagagtatttatacaaatgttttagcatcttcatatgcggtg

SEQ ID NO: 139438 - DNA, 1008 bp, Homo sapiens
cagccttttccagtctctgtgtcttggtatagctagttccttctgcctggaatacttcctcatctcacttgctttcctgcctggcagcttcctacttgccctctggaaccagctctagggtcaccacatctctgcttctgagtgcctcctcagacacagtctgtatttcctcttccaagctctcatcacaaacattgtgctgtattatatgtttctgtgtggtcttccttctatgaggaagccttggaaagcaggagacttattttagtcttctttatgtttcttttattcccaacacattatgtctgccccatagaccttttcaataaatgattattgagttagtgactccttttacatgctgacaaatgtggctcttattactccccatttcagtatcacatatttgtaaaagtgaatccttcttaatcgttttacttttctcctagtaaattcctcatctatgcctgtctgctgctgttctctgtgctgctggcccttcgtttggatggcatcatacagtggagttactgggctgtctttgctccaatatggctgtggaagttaatggtcattgttggagcctcagttggaactggagtctgggcacgaaatcctcaatatcggtaatactgctttatacaacccattggtctctagcatgagggagcaatatcttgacttttctcacttttgatgaagtaaggaccattttattttctacctatctggggtcttagaactatagtataagctaacagatctcttctgtgtttttgaaaatttagtctttggtatgtattttcttacaaaagcagtgccatttgggggtaagttgccagccagctcacagatgcctatataatccaaaatgcacccaaaatacagaactggtatgccatactagactaagcagcatgaaaccaccctgtttttaggaaaagacactcatattatgtttggtcatgaaagatctttctccaatacagttttggaactggggctccc

SEQ ID NO: 139439 - DNA, 1052 bp, Homo sapiens
atatcaccgaggcacctaggtctgcgtggagagtattcttctcaccttcttgtctgcctttgcctgtaacaatgccactttcccaagcctgggtcctggttagtggccatatccaataccaggggtcagccctctctcctccctgactggcctgcttctgccattgaggccatgatttcaggtgcacgagtccaatgttaggacaaacagccacttctaaaccaaagaccaagtaagcaaaccattctcttttaggctaggaagtaggagaaagcatcatcagtatggtctgagaagcagcagtcttggaggagtgaagcagacatacaaaaagcttggctgtgtctatggcaactaggtgcagttgtacaacctcccaaaggctagaaagcccacttcccttgatgggagggctgccctgggaagtgttggccaacagaacaggggttgctttgtgggggatggggacctgccagtgcagctcctgacacaccaaaagcgaatcccagcatctcagaaactcagcgtcacgttccaaagagagaaaaaatggcctaccaagagcacttgtttattgctcagaaccctggtgtagcccagctctgcatatctgctggctaagagaatgtttgactaagggatgcactcagagctcatttagccaatgagcctttcttctactggtgagaaaactgagggctttttctgccctctgcatggctttttagaggggttgctctaaccacataccataccatgagcttcactcaaaactcgttgcaaacaatgccaagccttggaaactgtaccaaagcactctcaccttcctgtgactcacagtgcttgctttattccgcactcacctgaccagtcatctcagtgactgctgattttggttcctcagtttgggcaatccacttggacttcctctggcttgtagacttgaaaataagtctacaagccagagaaaggcttgaaaaatacctgagggctgtccctcaggtatttttactaccctggctgtgctgcctcagcctgtgtctgtaaagaga

SEQ ID NO: 139440 - DNA, 1050 bp, Homo sapiens
gtactgatggggataaccccaagcttaaagagggggcccttttcctccagggcttctagtgccatagtgctttccagaagagagagaaagagagagagagagagagagagagagtataccaactaatgagtggtatgttgtgtccctgcaatggacactggaacagcaccctccaacacacaccaactttggtggtcgactatggaaaagcttaagggaattaagcctgtaggcatttagctcatgagaaaactagcacggagatcacttgaattttcagtttggactgccactttaaatccaaggtatctttgaattctcaaagtgtatgatgtttatagcataggaaaagatgatgcttatagcataggaaaagatgatgctaaacaagttcaacttttctttttcaagaaataaggacttgaaaaaacttggactcacattactttgaaggctagttctgcagtcaatcatgtgacaagatgagcattgctattgttggtgtaagatagtcttgctctgccttcgtttcttgatgtccccaagttccagaaaactctgttctctgccataatgggaggtcactgtgtgctgtttgattttagagtcaaataagttttcagcacatggtcagcttgagagacagtttgccctcaattggcttattggtttgtacaattcttggctccttcaagcagggtcctgccatctgagcccactctgtgggattatgggatacctgtacttgccaggaagtcctggcctcaagctgattcatcactgggtagcacatgacgcccagatgagaggggggcatttttaacctcaatggcatgaaaatttcctgaaatcaaaaggacagagattgggagttcctggggagcagcagcagcagcaatgtcaaaagtaggatcaaccagagcttagaatattcctacaccaactttgcaagttgttcattgatatgtgggttgctggaagaaagtttccagcactgctgggtcagcatataaacaaggaaaaaagggtgtgttgatggcccatttcaaa

SEQ ID NO: 139441 - DNA, 1195 bp, Homo sapiens
atatgatcatctatgagagaatgagaatgacagatatctatctgttagtggatgagagggccggtcagattgcctagatttcagttccacctttgacagttattagcagacaaattgtttaaccttcctgttccttgtgtttgtcagttgtcatatgatgatagtaatacctagttgccttttaaggttttggtggggattaaatgacttaatctgtgattagaacaatgtctgacaggtagtagatgatctgtaaatgaaagccgtgatcattagcataagcagatactctgttttgctttaattgtatcacctctgttattgtctttattactatttaaccttttttatacatattaattatctttattgttatctaaacatttgtttgtcatcttcccaactcagtttttagctccttgaagacatatctcaaatttttttggttgaggggagggggaactctccattgtggtccagagtagctgcccactatatagttactgattgtgaactctttggaaacaagatttaaataatgatatatgctgagttaggagtatctcagaatgattggcttgttgtcatttcattatttcttctaaaaaaccatattattatttcagtactagttaatttcataggtattcattgaatgcttatggatagattgacaaatgaaattgttctgaatgtaaccatatgttgacatgaccattttatagattgttaatttctgtagccaacctcctgcctattatgggttgaattgtgtcccctaaaaagatatactgaagccctagtccctatttcctcagactggggtcttgtttgttactgcagttgtagttagttaagatgaggtcatgcagcactggagtagggtggactcctcatccagcatgactggggtccttatgaaagaggaaagcaccatgtgaaaacacagacacacagggagaaagccatgtgacaacaggcagagagattggagtggtgaagctgcaagccaaggaatgccaaggattgcagccaccaccagaagctagggagaggcaaggaagcattctcccctagaggctccagatggcacatggcctagctgacaccttgattttggactttgggcctccagaactgtgagagaatttatttctgttcttttaggccatccagtttgtgggacttctttaca

SEQ ID NO: 139442 - DNA, 1076 bp, Homo sapiens
tatattatttataaatatataaattatatatattatataaattatatattatatataaattaatatatattaaattaatatatatttaatatataaaatatatataaaatatatattaaatatatatattaaatatacaaaatatatataaatatatatcaaatatataaaatatatattaaatatatattaaatatatatatatatttgatatatatatatataatataaaatatatattaaattaaaatatatatattaaatatatgttaaatatataaaaatattttaaaaatatattaaatatatatattaaatatatatttcccatacctgatctggcagcaaatatatttttatatatggcagcaaatatatattttcatatatatatatgaaaatctggcacaaaaatacggttcttatatgcatgctaggaatgggagacgtttccaaagatgcttataaaagcactgtttataattgaaacctggaaacagctcaaatgatcactgggaggagaatggaaaaaccaagtgcaaagcagtggactgctatgcagctgtgaaaatgagtggaacacaactatatgcatcaacatttatgactctctcaacactatgtgagaaaagcaagtggcagaagaatatataatgattccatttacataagacttcagaaacatggaaaatcatattatttagggatgtatacatgtggaaaattttaaagatatgcaagggaattataaacctaaaaatcagccctagggaggtaggttggagtacctttaatgactgatgactaacttctccaaagtcatgaaagtttatgagggtgatgctacatttgtttcttcacggaatactgagtacccaaactgtgctttgtgctggtgccagaatggaaaacatggtccttggccttaggaagttctagaaatctaagagacgggacacaaaatatcaaggcataagtacagggtaagaaatgaaatacaatcgtcccttggtatttgcgggaaactggttccaggactcccgaggataccaaaatccttggaggcccaagtcctt

SEQ ID NO: 139443 - DNA, 1065 bp, Homo sapiens
tgtgtgtgtgtgtatgtgtgtgtggggggaggtcaggaaaagctttccatgttttgaagtaggtaaatgccaacaaagcatatgccaacgaagcccctgcttctgccttcaaatgagagtacctagaggaattgtttcaaatggcaggttatctccaaccttttctcctctcttcagttttctagatactgtgcacatccactctagagttccttttttcctccctcctccactactgattctgctcagaagaatcttcatcagtaatgcccaatgcctgggcttttctttggggtcctttagcccagacctgagaaggttcttggaaagtaaggagatgttttgatctggcacctttgttactatcatagttataactatttatacgtttctattcttcaacaattactgttttaacttttgctaaataagttactgtttacttataaatttaaaatgtactttttgtgaatagttctcacaggggaaaatagttcaataaaatgcagtttttttcattgagcagatcagctgggttcatgagttttggaattggcagatgcacgggaacttgatcttgttcctattttaaaactttgtttactggcaggtatttgactgttaaaaaatccattggtgagtttaatgatctgtttaaatgtgtgcagtattgctaggtagcctttgtacattaaaaacagataacctgatagtagttgacttttctaatagtttacttaccatatcactttcaatttatgaataatttctaaagttaccctgttccatggccacagctcatgccactaaagccaatcagctgtcttgaagatgtgccatttgtcgtgaggggaccaagaaatagggtgaagagatcagcccaaatccatcactagccactggaaaaaatgattcaaaatgcattctccactgagtctgaattacattatttttagccaaaggtctttgcaacatttaaagaaataggggtaggtatatcatcatgtttaaaatgaattgtaaatatcaaaattatacagagagtgagattttaaatgaaatact

SEQ ID NO: 139444 - DNA, 1159 bp, Homo sapiens
gtcttagtgaaataggaaacgcaataggtaatcacaatgattttcgggcattgtaataggattctggctaatggctgtgctgttattcagttaagcctctgtggaattgaagttttccttcctactcttcccaaaagatggctgaatatgaaaaaaagaaagctgctacagtgtatgtgtatctatagaacacacttaatgtttactttttatcactttcccgaaagctgttaactttaaagtgcttggaaatgtagtttaaaaattaatattattgaaaagcatgctagcattatttaatactagaagttgacacatctaattaatgttggtgccagattgtaacttttttgtttgaatttttgtgccagttttcccaaatgctaaatctctaatgctttttctttaaaaaacatatttctagtggcttgtattcctagttgcttaaaaacagtgtgtaaatgtaacgtcattacttctgatgcatctgttttgtttctagacgtctcgagatggagtcaatcgagatctcactgaggctgttcctcgacttccaggagaaacactaatcactggtaaggacctgctgacataagatttgcataacttgaggagaagtctggcaggatcaggtggcttcagtcccgcttactctttagcagtcaggcttagacaaataggctacctttgtttagaagcgttaacacagaactctctgcatccctttcttgattaaagagttctttcgagagcttcatgctcacaagggtagtgatattcttgtgtctgtaccaaagactgagaatgatttaggggaaaaaaatgtggattatctcttgaaagtctctcattggagccataagctctcatggtttaaggttttaagagcaaaatgatttccagtcaatgatgcatgctttaaaatgataaacttaaaggcttgaaggcttaatcattctcctctttgaaatataggagaacatattgctttaaaatatctttcattcgtcagaaaatggaagttagtatttaggtaatattttgatgttatttttcatgataaacgtatactaaaaggaagggatcaactttggaagggctagatcactacggcttaagaatatagaagcatctgacagcttctaagccaagtgctaat

SEQ ID NO: 139445 - DNA, 1114 bp, Homo sapiens
tgagaggccaaagtaggaggatcacttgaggccaggaattggagaccagcctgggcaacacagcaaaacttcatctttactaaaaattaaaaaacgagctgggtgcagtggcgcatacccatagtcccagctactcaggaggctgaggtgggaggattgcttgagcctgagaggttgaggctgcagtgagccatgattgtgccactgaactccagcttgggcaatagagcaagaccctatctcaaaaacaaaaaaagacagaataaactggaaagatttctactgctgacatttatttattaaaaacatgattatgtttctgtggttagagattggtagcctcatctctcagtctagtggttagtccgtgagactgtcccaggtgagttgccgtcctctggctgaagtagctcaaatagttacctttacaaccaccttagggtagcagcagcagtattctcattcacttctattgtcaccttgccccaggtagtgacagcattgtgggaaagctcagggaagcactgttagtgcctggaggtggtgtggccccactagttctcccactaccccaactcaacccagcacggtaatgtagaaacattgccagtgcttgctttcagccttttcagtaatttttaaaattgtagttattcttagctgaatagtttatattaaattagtgccatttgttgtgtatcttggtatctatttccattattttagggtactttttttatcttaatagacaaagaagttatttacatatgtcctttcaatggccccattaagggaagagtttacatcacaaattatcgtctttatttaagaagtttggaaacggtaagtagaatataagaccataaagatgaccctaactgttaaagataatgctaaattgtttctcttctactttgcaagattgactgtgggtcaaattaacatggggtatatttgcttctcaactcttaattttttgcttatgcaaaactcatttaacactaacacttgtatatgtaaggaacagggtcaattaaaaaaagtcttatccctcataatggtgggggaggggttagtaattgtaaccatttgctagtttggagaagttaggtgt

SEQ ID NO: 139446 - DNA, 1100 bp, Homo sapiens
ggtagacagtaatacacagtaaaagtgtattgagtgaacttgggaggaaatgggctcctaagttgttagtgctgctcagagggcaaaggcctagtcactgtggtttgaccacagtatggctcctgctacattgtggcatcttgaatactaacattgcttctggatttgagaaatcccatagctaccttttggccttgagggtactaaggaatttggctttgggttaatgttgtgactatagtagggcctactgtaggtaggtgataccctgtaatctggtagactaccatgagtaagactgctttcaggattccttccaggagcactttgtgtttaggtgctctagtgcatgagaaagataccttaaccctcgttcattcaggcattcatgtcttcattccagaaacattcactgagcaccatggtgaatttaatactgtgcaaggtgcataatactataccctgaggcctgcataacctcataggatatagagttgagtaattgtggtataatatgacaaagcctacagtggtatgcatagtgctgtgagaaggaagaagacgtacaagggaaaagacgattatgccagtgtagcaagtcatagaatgctttatagaggagatgatacttgaaccaactcttgaagaatggtaacaattttctggacaggaaggaaaaaggagcatatcaggtagagagttaccgtgtctatatggtacttttctgtatcgcatgtataacaatatggaaaagcaccatttgttatgaagatggttgaatgatcggttggagctggaacattgggggttgatggaggagtggggaacagaagaggatgaggctggaagaagagccagcagccttaagagtctcataagtcacagttaagcagtatgcaagttacacagacaatgacatatccaatgtgatttcaggaagagaactccagctgcagtgtgtgtgtgatgggttaggggcgggagagactgaagtcaggaagcccaactaggaagttattttagtttcctaggtaagtgataagggccttaatacagtcatagtggagatagaaaagaggggacagccatgagagatttgg

SEQ ID NO: 139447 - DNA, 1050 bp, Homo sapiens
ctttgacctcccctttcactttgtgtggactttgcctatggctcttggcactagcaacctggcattgtagttacttgagtccatgtgtcttatctcccagatagagctaggccctgaactccatgtgggcaactctgcttcttaacttcatgaaccctagggcccagtagagtttctgttacttagtgtatgagacagacagacagacagagacagagacagagagagagagagagaaagaaagaatgcattattttaggttatttaactcccctattttcatgtcaattactttaggtagttagaagtacaaggcatagacttttgagttagaatgggcctttgaaaatccttaaatatttaatgatatttagatactgatgactcaggtatccagaaagttcagctaatttgcctattcctggatcttgcagtttggcctgctgggttatctgaccttgaatgtgtcattcagggagaatgtagcaagtaaccttattagacggtgggtgcctttggtcagaagctggctggttctcctcagcgacctgttttctttttttctgtgtagggccagggctctttgagctatacagtttcctctgtacagagacaaagagtagcaaggtgttagctcacttttaattcttccacttttttcaaacatccttgcttccatgttgatgctagagtatcagacttatttagtgtctattctgtgtattttatgtataaatttgacatttaagaatacagttcacagacactcaaatgtcaatatggtatatctaagcataataacagactgatactgtgttttaaataactgcactgtatcgataagtaaatacatgaaaatatgctgcttatatacgtacactgttactgagtagtatttttctctttgggcatttaggtttcagtcatgtcatgaggtgtcttaccccgtgacattcctccttataggtacaaacagtaagatctgttagatgcttgctagagcatactgatccactatatttgaagagcacaattacatcttccaaatac

SEQ ID NO: 139448 - DNA, 1022 bp, Homo sapiens
agagtgagactcatctaaaaaaaaaaaaaaattaagtgtggctggtggtgtgtgcctgtggtctcagctacttggaaggctgaggtgggaggatcccttgagcctgggacgtcaaggctgcagtgagccactgtactccagcctgagcaacagagcaagaacttatctcttaaaaaaaaaaaaaaaggggggaaagaaaagaaaaactttgtagccccaaaaggtttttaaggaacaaaaaaccaaataacccttaaaaattttttttctttatttttcaaacttatctatcacaatatgaaagaaaagtttggattaaaaatggtgtagcccttcatgtctttgtccctgtaaatagatatttcatgttattgtagtcaccgtgtgtgttgtatgctgctgtttcccacttaaacttacttttccatgtaccataattattttaaaaactgtatacttgttccagcgagttgactataattttttctaccctgttatctacctctagctccattgaacatcttccttctgttaagtgatagccataagttcttagtagcgaaattattggatcaaagagtaggacaatttttatggcacttttaatgtgtgttttcaggcattgcctcgagtctcaaccctgccctatacttactaaacaagttattgaagctttgaaaaacttaggaaatggggatacttcacctatatcctggagcggttgtgaggataaaatgagatgatgcgtgcaaagcccctaatgtagtacctggcacagaagagaggtatttcctacatggcagctgctgtgatgatctcctggtgatgattgtgctattacttgactaacatgattccatcatgccagcagtcttctagaccacttgcacccagcgttggatagcaaatgatggagaagccttgctgtgcattaaggcccttctgctttgggaaatgcacgcatgccagagacaagcaccatttccagatgcgtggtctctagtgggggaatacatatgtgt

SEQ ID NO: 139449 - DNA, 1036 bp, Homo sapiens
tactttcttggttcagattttgctgtcccctttacctgcagtcccctcgtctcttgcttacccatcttccacacacttagccttcaacatcttaatctgtcctgtgtccttttccaggccatatgtgtgtgcccccagtgagagttcatcttaccgctcaattgttagtctttgcaagttcctctatcagagcacttatctcagtgtgccttatggaataattttgtcataactacctcctacctccccctaccactgcctgataaattatgagcttatcaaggcagggatcagcctttatttctctctctactgtcagcacagtgacatctgcatgggagttttgtaatgatggctttcttcttgaactcgggttagtagaaaggaaggaaaaatcactatatggaaacaaatgagatggatgtttctgagtattacaaatctaacaccaaaacctagaaatctctgttgctgttattggagtcatccacagagggcttgatttctcaagtctgtggtacttggccatatttttcatacctgtgctgagaatccctgcttcttgttttaggaagtcaataaagtaagaaactgccaaaaaaaaaaaaaaaaaagtcaactgaattgctcatatgaagttttggaaggtgacattatcttaggttttaatcactgaaagtcatccttaaaaaaagtttgccagtcaccaatacaatgcaagatacagattgaaacagatcagcccttgaccctgcttttggaatagcagtccctgatattcaagtccacatgtgcaactgtttcatcagtcaagttcatttcatgtcttgtgttgggtggtgtcaggatgcagtgggggcagtcaaggatttagtagtgtgtaggatgagtgatacctagtcccattgagggatgtgacagtcaaacagtagtgatgtgacaaatatgtttagccccaacataagatagtatacattcatttgtgcaagagaaacgcaaaggaaatccacgggggactcacaggaagaagagacca

SEQ ID NO: 139450 - DNA, 1539 bp, Homo sapiens
tgtgcctgatctgagtttttgtttgctaaaatttccattgttatgtttttttaattataaaagttctatttgattgtttttcagatctgtttggccattatttataatctcttcttctgtgctcagatttctcatcctctttttgacttccgaaagcacattaaatgtaatttataatatgcatctgatgattacaatacccgaagtctttgtggacttttctaccacaggtgtgtgtgtttgctggctcatggcactttgtttctgatgtgggtgtgtcttgtgattattgcctgcaaattcctcttccttggaagtttatctgtgggaatactctgagcatatgactgaaggcaattttaccaagagaggatttgtgtttctttctgccaggcatcttgaagcatgactggtttgggacgcttatgaattaaattctcaggttggatgtttttgggaccatccaagttttgtgagtttcgtccacatactacttaagggctgacttgtgactacaaatttctagtgggggatggtggcagggatttgtttcctcccttgcttagcaccaataatctagacaggaaggttctcttgaagtccccaggtggtcctttcccatgcatccttcccctgagtgtagcacttgggaggtttcctcattttggtttggccaggtcttcaggccctatctcctgtgccccaagaggccatgaaaaccagttctggaagtggcctgaaagtgaaagccagtgtgttcctcttgctgtctgcattcctgtttgcagttagtttttggcttctgagtaaaaaagtctctgttatatccagcatttttaggtgttttcagcagaagtcccattatggtataaagaccatcacatttgcagacacctctccctcttttttttgaaacctaactttccccatagcttctgagatctaagtcctctgcctctcacttcttttctggctcctctgcatccttctaccatctagacatgggttttctacaaaagtctgtccttgctctgaattatgccctgggcaaactcatgtccacgaacagtgcctttctaagcatggcttccaaatataaagcatggctttatatttccctgtagctgttatagaacttcaagcaacaccaaaagatctgtttaaaatgactctcatatgccccagaaacccactcctctgtgttcccagttactcttaatgatatcattgtcctcttgttcattcaaatttgaacattcgaaatcaaggccatcagaggttttcatttcttccttttcttgttttctttttttttttttgagacagggtcttgctctgtcacccagggtggagtgcagtggtgtgatcacagctcaccgcagcccgcaggtgcatgactctacacctggctaatttatttttcttttcttttagatggtgtctcactgtgttgcccaggctgacctcaaactcttgacttcaagaaatcctactgcctctgccccctaaagtgctgggattacaggcatgagccaccat

SEQ ID NO: 139451 - DNA, 1049 bp, Homo sapiens
aggttatatttaagaataatagttgaaagtgtcaacacattaataaagtgttaaagaatacattgtctggaagagaaagtaaatgacagctaaaaacctcaagacgtataacctattcacttcaggttttaacaattttgaaataggagctttaattaggcttgtaacaagttaccacttgtaggggattttatgctttttgataatgaggtacagatgaatgtgttttgttattgctttatttttgtttttgtaataatccaactttatgttactctgagagcctatattctcttaatctttaagaaaaaaagaaaatatatctgaaaagtaggtcctcgtactttcaagttcagaaaatggtggtattggctctttcagactgctcacttcaattgagccaagtagcttatggaaaacttagtttttaaataaaaacaccacataaacactacctagtaatgctttttgaaaaatgtttttctgtgtttgtaagctaatttatttgaatggtgaaaatattggtttaagcacccagtcttttctaccctaagctccaatttaatattagatgtgttgctatgtgcttcacgaggagaaatatttggctgttgtgcgattcataattcttcctgaaatatctggggtccaagcctggctcttagcatcaagagtaaactgggagttgtttttgtcaccaattctaatagacatgtttcgggttaaaggataccagttagttgactcattctggatattagtcagaatgtgaagtatcatcatagaagtgatctcatcagagagtccatctgatgtgtggttaccatggggacattgtctcagtctcatactaatgacaaaaaaaaattgatgttgcttctgttcaggttcttttataaaacatattaaggaagttaggtagataatttttgtttaggccatatagctttgattttctgataacaattttataaacttagaaattttcatgtaagatacaggaatactggaagcaaaaaaaagaaggtgctttaaccttagggattgaa

SEQ ID NO: 139452 - DNA, 1073 bp, Homo sapiens
cttcctgtgttagattctagaattgagactgttgggaaaatgatctgtagacagagttggtattatgagaaacatattgtaccagagacaatttcctttacctctcactttttgccaaagctgcttctatatgataacaaatccagtgcaagctacataattaaaataggatcaagctttcaatttcctttaagtgatataactatttttaggtaagcaattaatttatattggatgtggtgctaattaagaaaagactggtaattgtacttgtttctgagttatattattaaatgcatgtctctgggcacacacacgcagtgagattgcaagtgaacaagtattctattttagcacaatcagattcacttcttgataaccgtcagtgctttactgttttacagttttaattgtttgcttggagatttgctttcttgatagcttaaactttctgacttaaccataggtgctgtcatggattcatccagaaaataagacggtcattgtgcgttgcagtcagcctcttgtcggtatgagtgggaaacgaaataaagatgatgagaaatatctcgatgttatcagggagactaataaacaaatttctaaactcaccatttatgatgcaagacccagcgtaaatgcagtggccaacaaggtgagtggacttaatgatgtgctggacacttagcttacatatggagtgcagtgttttctgtgaatgtttttgccatgatatagaaacacgtgggtttaaattaatagttaagaaaaccagttctcttagacagaaagtagttttaatcacaaaacttaaacaaaattgaatatatcaaaatcaaatgcaaataaactttaggtaaataggcatgtctagactgtaatgaaattgggttttggccaggaccttggcaggaaaaagttagattctctttaaagccctttcagctgtggatgatcactcattgtgtacactattggggcatctgtaagaagctatgggaagctgtaattattaaaatactaaatttgcatgcttactcaaacactccctcccccatacccgtatatactca

SEQ ID NO: 139453 - DNA, 1008 bp, Homo sapiens
agaagtctgtctcaattgactttttgctgtaagcagaatatgctgaatgcacttaaaattgattagggtcatcatgaacatcagtgactgcatagtgttgccttcagaagctgctgcaaggtgtatggctgtttgcttgctctactaaatggccccagattgatgtgcattttacgttctatttctcctttttgttgtttttcttttccttctcctcccatcattgctgtcactttcaaatgctcacgaggggcctgccccaaattgctcactcccattccagctttcagatttattgtttctcctctgctgtaagcttaaatttcatcatatttaatacattgcttatcctgaggttatttgtctagcatcttcaattattcagaacataagacaagaaccagaaagcaaaacaagttcttgagcagctcagataggtgcagcagcttcctaatagaatctgtgatatctgtctggactaggatgtgtcagactgcatgcatgcagagctcaactcttcattatttgtgcacagatcttctgtcctacacatttaatcctgggccacctccccatccccatgcatgcttttaaaccagctatttgttactacggttgttttttggtccagagatgattttgaaattatatgtgaagcagtcagtaagttaaattgacaagtaaattaggaatcgtaagtgaaacactcaggaaattaaatctaactctaaatatcttcttggattgtccttaattttatatatctgtgtacctattatctttcatatatatttcagggtgaatatatatatatatatatatatatatagcaatattttcatgtacatatttagcctgaaatagatatgatatagcattacaatgaagtatttacaaagaatattttagaatattaaaatgcatgaaatggatacactaattaaagctcattccagcaacagaattcctgaaggcctttttaacactcaggaaacaagcttctatttc

SEQ ID NO: 139454 - DNA, 1811 bp, Homo sapiens
tgaagatgaaccaaagcctgccctggcaagttaatacttgtagttgctgcagtaggcggtagccatcttgtctcctcttgaaatcttctattctttcagagctcactatgtgcagtgctctctcattggtgtttgcatagcagagaaatagtcatggtttagtagaaaaagttcgagctttgaagccagacttagacttaaattccacttattacctatgtgacttaggggatagttaactagcgtctctgagtttctgttttctcattggcaaaatggggacagtaatacctatcttgcagcactgctgaagagagaaaattatgtaaagcaagagtcacagtacctgggatgtcataggagttcattaaacagtggctggcattagctattataatagagtgtggttcctttaatagtatgagacctaggtaatattatcccctattttacaggagaggatgttgaggctcagaaatgttaagtgccttgtcccagatcacatggcaaggagaagctgaagctgagctatctcagcctgggtctgtctccaaagcctgttgttttcctctaatgcatcacgtcctacgtgagtgctgttacagtgccagaggtgcctgctgctgcctcagtctggctgcctcccgccttccccctgaagagtactattagagatacaaaactaatggagaacgaggacctttcacaacctgcttttgcctttccagatccggaagaagagctattaattatagagcattttgaggatgatttttttccttaggaatacagattccccaggaaattgccagccttctgtctttttttcaactcaaagtatgactaatgtttttgagacttgttgttggctaggaagtcaagtcacatcaattattcatttaaattggagggtttggggttatttggaggacaaataactagaaatatttgtgtaagtttctgatgaaatagaaaactcaactgattgtttgtatttcatgttgtttcttaggcaacaggaggaggatatgaaagtgatgatgcatatcataacgccgaacttttcttcttagacattcataatattcatgttatgcgggaatctttaaaaaaagtgaaggacattgtttatcctaatgtagaagaatctcattggttgtccagtttggagtctactcattggttagaacatatcaaggcaagtatattttgtgaaaatatttgtgtatataaaaaagaatgtaattgtttagtggaatggacatatttttaaattccttaaaaaaatggacattgagagataaactttgtagtagaggaccacatttaacagttttatgttgctttataatttgcttacctaaattaaagatttcacatcatcactccagaatatatttagagtttgcaaagacatctctttccatctttcagtattaagtcgttcagtctttcatgcaggtttatttaggaatagccaatttattatctaaccattactggatatgacctctttggacctagataagaggtggttagttttgttttttttgttgttttttgtttttttttgttttttgaaactaatctcaaatgacttattttaaagaattggttttgtgttttattatgttcaatcctttatcctgataaaggcagcaataatcctccactttttaaaaagtacttgaagtgatctgagggaactaacacttttagaaaccatttagttctgtacacaaacaaaaagtcagctttaatgtataggtgaattattaagatatattctctagtcaaattttgttttccaa

SEQ ID NO: 139455 - DNA, 1040 bp, Homo sapiens
gtgtggcaaatgtcaaaacaggtaaggaatatgagggatgaaaatacattcaactcattgtttaaattaaacattttaatataatgattgggatttgaccccaaaataatacagggtagagctagagatgaagcaagactgggcatgtgtgaatacttgcagaagccaggtacatgagcgttcacctttttattcctgctactattgatatatctgggattttccctaataaagttttaaaaattaagtatttaactctgatgtctctactagtggaattgacaataccaagtcgtcgtttatatacattttacactgacccttatatatagctgtgtctgctatctcataatagcttaaataactaaactacactgtacctgcaggagaacccagaaaatcagcctgtttatctcattttcctctttattgctttatttaacacttaaagtgctcagacctatataaactgctaaaaaaagaacaactgtagtgtgtgtgcagattacagcctctgctgtccttcctagagccctacaatgtggcagcatttgtttacttctacagtgtatctttctaattttataaagtttcagtcccagtttttcatgctttgtttgcttgtttttgtttagttccctacagcttttgaattcaatgaacaatttttgattataattttggatcatctgtatagttgccgatttggtactttcttattcaactgtgaatctgctcgagaaagacaggtgagttaaaatgctattttttttgatacattaggcttgccaaaatgtatgtagtctaccatgaaatataaaaaatatgatagcttgtaagacactgtctttgacctcaaagagtaggaattacattaaaggtatgcattttgtgttatataaaggaatacctgaggctgggtaacttacaaagaaaagaggtttaattagctcacagttctgcaggctgtacaaggagcatagtgccggcatctgcttagtttctggtgagagcctcaggctgcttccactcatggcaga

SEQ ID NO: 139456 - DNA, 1091 bp, Homo sapiens
cctgagtaggtgggaccacaggtgcacaccaccacagctagctaatttttgtagttttagtagtgatggggttttgccatgttacctgggctggtctcgaactcctgagctcaagtgatccacccgcctcaccctcccaaagtgctgggattgcaggtgtgaaccactgcgcccagcctggcgatcagatttcaacatgaggtttggagagaacaaatattcaaactatgacagaggttcccccaaaagtaaaaatatagctaccatacgatccagcactcccactattgggtacatatctaaaggaaatgaaatcatcatgtcaaagaggttatctgcaatctcatgtatattgcagcagtattcacagtagccaagatatggactcaacctgtgtccatcaacagatgaataaagaaaacgtagtacctatatacagtagactactactcagccataaaaaatgaaatcctaccatttgcaacaacataagtaaatctggaggacattatgctaagcgaaataaaccaggcacagaaagacaaataccacatgatttcccttatgtgtggaatctaagaaaacttgaacctatagtaacagagagtagaagggtagttaccaggggctggggaaggggtaagggaaagaggaacatagtggtcaaaagatacaaaccttcagttataagtactaaagacctaatgtgcagtatggtaattatagttaataataatgtatatttgaaatttgctaaaataatagatctcaagtgttctcactgcaaaaaaaattggtaactatatgaggtgacagatgttaattagcttgattgaggtgattatttcataatgtatacatatatcaaaatatcacatcgtataccttaaatatatacagtttttatttgtcagttgtaaataatactgggggaaaaacacaattgtttctgggaaaagaggtgagagagagcactttttttcataaccttgtcaaactatttgactttttaaactatgtgcatatataaaaataaaaagagtaacatgcaaataaatacaatgtggtatatagattttggcatcaaaaag

SEQ ID NO: 139457 - DNA, 1053 bp, Homo sapiens
gattctacctttggtaattttaattcttgtatttttatttccctagctttgatgttttttttttttcttcctctctctagtttatggtcaaaattttgtaaacgcctgcaataaaaagcaatgaaaatgtgaatatctttatgagatggcaacactaggctgaaaagcttagacttcgtgtagtcagttatccagatgttttcaaagatatggatgttgacatgatgtagattaaacatctggatggttgattaaaataactgtgtccagatgcctactgtcaagtagacacagattaagatttcatagttccaacaaatggaaaagttttaaaagtcattgggatcttaggataatttttcttttcactgaattaaaaagagtataccacccatctgttcataaatgttttacctagctgggaatactcttctttggtcagtgaattgcatttaatggtacagtatcctgcgcccctgtcttcaggcagaaatagtggctctcaagctaggccattacctatgcaaatatcgataagtggctgccaagcactcactggcccatgaggctttttgagctattatgaggataatgtaaatgtgtgattcaatttgatgctgaactgtattgctacaggctgcaaaatggtttgtggatttatgtgtgtttttacttaggctctccactttctctctctgtctctctgtagaaggttacagaaaggactgtttctttatggtcactgataaacagtaataaagaaaaattcaaaaaccccttctatactaaagaaatcaatcgagttttatatccagttgccagtatgcgtcacttggaactctgggtgaattactacattagatggaaccccaggatcaagcaacaagtaagtgaagtagcactgttaaaagatagcaatgtcaactgcttgccttagataatgttatttggtatggattttttttaacagcatgaagaaaaatatcagactctaaaaacacacttattgttaaactcaaccttaatttaaattttttttaattactaaaccat

SEQ ID NO: 139458 - DNA, 1027 bp, Homo sapiens
tgcctatcttcttttccatgccaagctgagacatactttataattcatttcccaagtgagaagttgaggtataatattttgtcacttggcttgaagttttcatttcttgttgtctttgtattctatcacaaatggactcttctcttcttttacctgctctaagtggtttgtgtttgtctgtagcccaataacttctatatattttatacccattacttgactgaattatctttttatttctaacagtttttctgtttactcttttcagttttctgatgatacagtcatgccatctgcaaaaattactgttacccgatttctttttcttatctaattgcacatgctcattgtaatattcaagctgattctaaattctaatactcatatttcaaagggaggttttaaaaatagccacagttttggaggagaatatcaaggaagaacctgccctgctatatagcaagacttatttggaacagagtagagcccagaaacagacctgcgtcaatgtggagacttggaatagtaagaaggtggcaatgtaacacatccctatgagtggaatgttcagtaaatggtgctgggactggaaatgaaagttaacatgtcaaaacagaactcctcatgtttcccccaaaacctcctcctcctgccatcttccccatttcagttcgtggtagcgccagcctagtcgccctggtcaggaaccttagagtcatccttgacacctttctctcccacaccccatgtccaatcaatctgtcaggagagcttcttgggctctgccttcaaaacacagctagagtccaagcacttctcactgagctcccaccaccatgctggtgtgtgctgcctgccatctcccgtgtgtggcagcgataaccttctagctggaccccctgatgctacctttacttctttctactcttctcagcatggcagccaaagcagatcatgccactcgcctgctagaaactggccaggtagctgctcacctcacccagagtcaaggcgcaagtccttacaa

SEQ ID NO: 139459 - DNA, 1503 bp, Homo sapiens
agactgtcagtaggaggctattgtagtaagccaagtgagatggtggtccagagtggagcggaggaggggagaagtggtcagatactacatgtaatttgaagacctgcagggtagagccaatggggtttgctgaagattggttggttggtatgagagaagaatctgggagaattccaaaattttagcttgtgggaaaattgtgttgctgagatggagaagtctttctaaggtggagcagggttagaaaatagcaggctcttcgctctggacatatcaattttgagatgccaattatatgtcccagaatagatgtcaaagatatagttgatctatctgagcctggagttcagggttgtctgggctggagattcaaactggggagtcatgggcttatagatgaggcttaaattcatgaggcaggtggagttcacagaagaatgatggaggtctggaaaagggaattgggctaggaatagggctgggtggattttcaagatgcttaccaggtaagagtgacccgacatggtgagcattcagatgtgaggggggagtgccgggtggactccaaggcaaacctcagctttctagcgtgtgggggccggataactggctgtgctgcgccctgagttaggaaacacaggagcagagtaggttgcggggctgagcggctgatgctggtttagacaggttgaattggcagggtctctgggccagactagtggacaggtcttgtaggaacatcagcattgagatcaggagagtccaggttggagaaacagagctgggagcctccagcctgtaagtagttattgacaccaggagtatagagggcaattgcacagactacagagaagggatgggggaggaatcatggcctcctttctcagttctgtcagctcaacaagctcagattcacacttttctttgaagagtgacctctagaatggaacctggctctatgggtgggacttggccatgtccctgggactatggggccttcacttctcttctgaatactgtaattaataatgaggaagctgtggtcctgtaagaggatgtgtcttgccaaagatcatggagttagctggtgacagaagcaggactcatgtccaggcctcctgtctgctaacccactgtgcttcactgtgtgtaactacattggccaggatgcttctggttgcaggtgacagaaaccacagttcaatctagcttaaggcaaatgagatgccctggctcacagaactgctccagacaggaggagagatggccacaggcacagttgaggtcaggattgcaaacagtgttgtcgggactccccatctctctctccctctctcttttattttccctcactttttaatcgctgtgagttccttaagatggtaggggtggggtggggtggggagtggcctccagcagctctggatacagatccatgtatttcaggatccaaggggaaaagtctgggattggctggtcctaggtaactcacctacaagtggg

SEQ ID NO: 139460 - DNA, 1076 bp, Homo sapiens
cttcccaagacagcattctctggagcacctgtaaaaatgcagcttcccgggctccatcccagatttactgaatcagagtgtctgagggagggaaacaagtgtctcatatatttcttatgcatgataaaatctgaaaacctaggcttcctgagtttctgtctgttgaaattggtgatgggaccctgcatttctggtatattactaagaatctgaataattagcaactcagatattggagaataattattttattatttactcatatcataaattgtcagtcagcccagggtcagctcatctaaagtacagtaagaatatcgctggtatcacgtgacatgagtttagatggtatgtccatggacgtattttagtagctatgtaattattttcttgtgtattagaaaaatcagcacatcaggcttgtgatttagtagatgttatggcttagagcaggcaaagtattaaaaaggaatggattttaaatcaatataaagataaatacaaaattagtatgggcagttggcagatacagcaagccaaacttgttgaggtggtatgtgaaatggcaagtttggcaagcattgtcccagctgaaagagtagatagctattatactgaattgtgtggcagctaaattaataaatgcctgatttaataccgagtcatcctgaagattggcctgttaattaagactattacacaaaatgtaataaaatatttgttttgcttgtcccccctccactaccaactcaattgctttcatttttactaggctaacaaatggtaaaaaatttctcttgaatttgccagaaattttaagaacaaaatttgaatgtaatcttctgtagattagatgaaataatacagttacaaatggaaacatttttaggaactattagtagaagtgacatcattgatcacagcttccattgtttggaaagtaggactaggttatgaaaagagaacatgatggagtagtacaaacaatattggttagcttgtgaccttgtatagtctctgaggctcagtttccttttctggaaggataaaggggcttggattagattattcacctc

SEQ ID NO: 139461 - DNA, 1222 bp, Homo sapiens
tacttactgtgtttaaaatacatgtctataaactgcctttgtattttggcttgactttgccctttaccagttttctgtggtatgctttattttctgtgagcacattatgtgcctgttattttgtttctttgctatatgctgtctattgcttggttttgaaaagacagtacattctttgaaatccatgatgtttgtttgcttttcatttttctaccccaacacaaacacagaatagatactccattttaggctgtggatgctatagatggcctacatgttatttccttaactccaagggggaaaatgttgtgatttgcaaagtcatgaaaggtgtgtcgacttttacatgcttactgtctccttaaaaaagaaattctgtcctttcacctgtctgtttgcacgtgtttctctttctcctctttgccttttcttgtccatgcacctggtgctgtgcaggagattcaggaagaacacaatggctacccttctgaagctgaagctgatcaggtggcaagttctacgtgttcatctgtttgtagctacagatcgtgtatttagaagccatttcattctagacttctagataataagcaaagctttccagatgcctctaccacaatagtagtgccctcctgtccaaatttggtagattccatatgacattatttgcaaaaattggtttatccaacattttgtcaactagaaatttgtttgtctgtgtttcttggtttgcccagatagggttattgatggggttaatgaccctccatcacggtaggattctgcagtgcctttacatagacatagaggggacagatacatatgctaagggtgctccttgagggtgcacactttgctttcttcaaatatgcatgatctatgcccaacacagtacctggtaccatgtagatatttgtggaattggtacatatattaatcagaatacaaaattattcatagagtattcttgagtgcttactctgctcagtacctctagaccctctctggagtcttttaaagctgcagtactttccccaatgcttatgtgaaacaaagagaagagcagctccagggatgtgtggcatgccccaggtgctcagctgcaccattgtccaccatcatccagccccactctcctttggtgaccctggaagcaacttgaagagcccagtttgaaagccactgcttttggcatgcaaccattatataaactatccacctg

SEQ ID NO: 139462 - DNA, 1050 bp, Homo sapiens
gcatcattgtagccaggaaacctagtaaatcattagcaatttgcttggtgagtatgaaattactgcaaagtaaattgtcttgagacatgcctgacgaaaacaccctgctccgcagcagggattggaatactgttgcctgccagatgagagcacactctctcatggcctggattgggtgaacactgacaacttcactcttcatgtccctggtcatacgctttgtgcatgcatgtccgtgtgcacgagcacacacagacacacacacacacacatagctgggctgcagtagcaaagcctaggcctttccttagttgtgtactgtaccgagactgttctccggttattttcattagacttctggccttcccaaactttctcttaggctgggtcatttctccagttagctaagcacctatagctcatgttggtttcatttgtattagtttcatgctcagaaggtaacctttttctggccttatttgcaaattctagagacaccttttaatagctatctgtgtagtgattacagtatctttctgtcatgtcaagccatttctgtattaatgcttcctaactgtgaaatttaaatatgttgtaacaatttgctagaatatgcagcatggtgtcttgtgatgctaagcttttaagttgtctttgaaggggttgggtgcttattttgcacgcttctgtagccttatagtgacatcacagaacaccgaaattcttcacaggtatacggaaagtgagatttactcccgtttggtgtcctttttttttttttttttttttttttttttttttttgccaggctctaagggatggaaataagctggcacagatggaagaggctccacttttcccaggagaatcaattaaagccattggtaagtttagtgtgtacacttcgctttttgagatccataaaatgaaatggcacttaatttgcaagtggaggtgatgtatgtgctggagatccgccagaccaacttaattaggggacaaatggactagatctattcatcctcattagtgtcatcatgacctaagaga

SEQ ID NO: 139463 - DNA, 1051 bp, Homo sapiens
tgattaatttatcacccagggaaaatgttaactacctaggaaaaatgacagaatataacttcttatgaggccctttacttaaaacctcattaagtagcaaatcagaattttgttttaaaaaattgaaatttattagaagactatgcatctctctatattgaaagtcataattgatataatcctataaaatacaaaattcctggaaaactggaatcacaaatatatatttggaaaactcgtgttaagttttatggaagcacaagtctatggcagtagttgctactttggcctttttctttcagtgaaagatgtcatgtatatctgcccatttatgggagcagtgagtggaaccctgacagtgacggactttaagctgtacttcaaaaatgtcgagagggtgagttttttaaagtgtgttttattttaaaagaaacacttttaaaagaacactaaaagaagaaagtaaaaagtcccctgaaatcccattaccctgagataaccacaggttggattttgagatgcacacatttgcaaacagatgtttgtatcttgaaaacaaaggctgttaaagtaccgcttaaacctggaggggaaattccattgttgtctcaatatatatttcacaaggaatgctgtcaatcagacttcaatttagctgggacaaagaggaaatgcgaagtaaacaaacatgttttgtaacccagcaaagacttaaaatatgaaaactgttgactgacactaataggcattgatcttaatttttgaacctaggacccgcattttatccttgatgttccccttggagtgatcagcagagtggagaagattggagcacagagccatggagacaattcctgtggtatagagatagtgtgcaaggtataatagaaacgccaagtgaaaactaaaagagggcaatcagctctgaactttttctccctcagtctcttcatggtctttggacagtagaataatttgtactgctagtaactcaaatgttttcgggatagcaacctcttcaaatctcatatcgaatttaaactattatgta

SEQ ID NO: 139464 - DNA, 1108 bp, Homo sapiens
ttcttctaataatttaagtagaaatgtgtgtgataactttaatcacgaagtcatgtaggacccactcctaattgatgtattttattcccagtgacttgactttggtaatgtttaccaaaaaccctacctgaagtaccagaaaagagatcctgcctgcaggatcatcagcgccccttccaaattttgggttaggattccttacaatctatttattttgattcaatctctgaagatagctccctctggttggtcctagactgcgttcaaaaccattttttttttttccaaagaaccctttactcttccagatcatgaatctgttggcttactaaactcactttagtcactccctgacaactgtccttctcaggcagggttccccatatggaacaatggcaagcagaggggtgacttgatcggttctgcaattttgaaacatgtcgtcccctttctcatgacgcttgagtatcttcccattatccttagactaaaagaaaaactctccttacaagactgctctgcctgacccactttcctctgcagcttggtctcgaactgccctcctctcattctggccatcccagtcacatgggctttcctttggtggttcatacttgacacacccacccacacacacacacacacacacacacacatcccagaatctttgcatgtgctctttccttagcttgtaagcaatcttaaatagcaagtcagctcagtcagccaccaaggtgtatgtgtgtagccatgtagcttagagggagggcatgtcaggaaattatgttgcttaggcaggcatcctggggctcttttactaagatatttttatggctggggtgagcatttgctaacaactgctttaaatgttctctaacctagattactaaggtaatgctcccagccttctcagatcatgcctaagagctttacaaggtgtggggtttattttttaacaggtgatatacaattcaaaagatacaaaagctgtgtatagtaaaaaatcagtctccttccacccaccaccctgccaccctgttccactcatttcaggcacccactgtggccgatttctaatgtaaccctccacagatagcctatgcacatg

SEQ ID NO: 139465 - DNA, 1442 bp, Homo sapiens
ggaaaacactcctgaggtcgtaagggtggcagggccaactcagagggtccagaggagaaaagcatttgcagtggaagctttgtggaacaaaatagaaagccatctaggaaagaagaggcaagtgatgactagcctggtctgtggtagagggcaaaggatccagtgaggagtggccaagcagcggcctggggcagcggggcgcacccagcagatggagcatggagctaaggccaccagtgagggagctttccagctggcaggccggggtactatagtgacgtatccttgaggttccagggccaggcagctgaaaaggaacatgagcagttcagactgccccatggctagtggagtgtggagacgatctagagatcatgaagaccctaggtgagagggatgagggagcaggaggatggagaggaaggcagatttctgtatcattggctgacagagcaatgctattaaacaatgccctgggtacacgctcctgatggactgcagttaaactctgagagtattcaagtcaaaagaaaaatctcaggcctggcgcagtggtgcacacccataatcccagcactttgggaggccgaggcgggcggatcacttgaggtcaggagtttgagaccagccaggccaacatggtgaaatcccgtctctactaaaaatacaaaaattagccaggcatggtgctgtacacctgtaatcccagctacttgggaggccagagcaggagaatcacttgagcctgggaggcaggggttgcagtgagccaagctcatgccactgcactccagcctgggtgacgagcaagactccgtctcaaaaaataaataaataaaaaagaaaaaagtctcagcagacagttatctgtccatggaggtacaggctgcctctatctgtcttcttcaccacccagaaccaaccatgccctggccacccatgtggagactgggggtgcggggcaggactgaatccaaaccacgacacagtggaggatgtggggagcccttcaggaacccgcagccagagctcagccactgaacacaaagagaggacacaggcttggcggactggcccctgtagtgcaccattctctaattttgttcaatctcagaaaatattacagtgaaaaagtgtggtggggaggggcaaactctcccccttcttcaaaggggcacctgttctgtgattcaagcacctgccctcctactgctggactaacagggtctatacactgtagccctgatgcatcttccacacgcctttctaccacctctacgtggaaacagggaaaagggctgccaccccaacccccatatctgcaggtaaagtagtttataagaagaagggccaagcactggagcacatagcattttatgtacctcatcagtacgagacagaagtgctaagactttttaactgtaacccagcaaacatcatca

SEQ ID NO: 139466 - DNA, 1623 bp, Homo sapiens
ccagaatctcaaggagctgctggccgtcagggcggagctgcagaagcgtgtggagggcctacagcgggaggtggccacgcgcgccgtctcatcctcatctgagcggggctcctcgccctcccactccgccacctccgtccacacctcggtctgatgggcgaggtcagcctgctgctccactgtctcccggtggctcaggaaagggacctggcgatcactgttatggctgtagcttgtgatcttgtcttttaggattaggcccagggaccatttgtgtggctaggtgacagctcccactgttggcaaccgttaccctcctgtcagcggtttcacaggggagccgtctgtcacgcccaccctgtgaagcaacttctggcattcaggcagcttgggagaaactaagtgaacggaatgcagtactgaggttcaagaaagctgtacgccatttctttccaacttaaatccttcagtaacaacaaacaccactcacttcaagatgcattgccagccccgtggcttccctcagctcttggccacaacttgaaaactgtcttgaatgaagtacttggggagaagacaggccactgccctctgttccacagttttcttcatgcacggggtcctcctgttaacaattactgttgtgtacatataaggtatttttagagaagagaaacaggcctttattttcctatgtccttttttacgtttagaatagtcacccgaggggggatcagctcaactgtactgtgggagaaattcttttccaacaaacctcatgctcgtttttctgtggtgcaatttcaagggcaacgtgttctgtcctcacctcactctggtactcgcctcttggggcggctcagcccattcatggggatggcaccaagcggccatgctcagtcttccagccccgctgagggtaaaccgaggcctctggcagctgtgcacaggtgctggcctctggctccttcaaggagcactgcctgtcactcgctcctgggctgtctagccatgtctcccacccccactttaccgcagccagctgctgggatcaaagcaagtctgttcttatgttatttgcctgtatgaaatcatttctcattttatcacaattccttcaactcagcttactcgcgtggctgcctgttcatatttgaaagcagccaccgtgctgtggctttggtttggaaaagcatagcacgcacttcccttggttttcccttcccagagccgaccgcagctggtcagccctctcttcccgctcctgaacctttacttactgactttgagctctgtgactccgtcggttctcgcaggaattaactaacttaccaattggttcaatccacttgagcgccatagctctgagctcctctgtgtgacatgccacagatgactattgcacacctgggtcctgccccagcaggccatgcccctcccatgtgccgtgcctgttgctgcagctgcccccccaccccgccactggctgcaggaattcagcctttagaggcagaggcagctgcagcggcccctgaggtcaaaccccagtgtgactgcatagcagtgttagctggttggtttcaaactactggattccaggcaaaggcctacagattgacctta

SEQ ID NO: 139467 - DNA, 1121 bp, Homo sapiens
tgctgaaatgccctgaactgaactgtcgtcttctcaatttgaagccaacatgcgagctgatgagaaggacatacttcatcccaaacgggccactctccatgaggctgcaacaagtgacgaggtgcagggctcctttctcacccagctttctggttgaaaaacaactgcgcgttaactggaacctccactggttaccagcctgcttggaaggcggcagagcagtcgacttgggatttgtgagcctgggactttttgctgcttccaggccccggactgcgcaacccatgtagcccgggagcggccccgcagcactctgctcctgcctctgccctctctaaccccaggacattggtcgctccacatcccctggccttagctgcttgtacggtgaggagtcacccttggaagtcctgacactgagccagtcactgaggggtaaatgcaagaattctaagcttctcgagaaataccttcagctgggggcggggcggggggagggggaggagggcagctctgcatcataaattacttactttagggaaaagtggcaacacttgaccaagggcgtgccttaacaccatcagaagacaagaatctgctcggtgccattttatttaatgcaaacactagacagtttacaagtcacacctggacacaagcacgtgaacagatgtacagggaattctggaattttgagatcagtccccatttcttcctcagggccctggcactgaaccccagcccctgtcccagagcctcccctctgggtcccaccccagaagccacgcacacctccttccgcccagctttatctttccttgagctgtgacttcacccagcatgtgctcagagttgttacaaattttctctgccaaattaagctgatagagattggccactttcaaccagtcctttcagtccactgtgtctcccctctcgcttgggacaggcccatgctggccagtgcaaccttcagatagacacatggtgaccagagcccgccaggcttctgcaggtggcagtgtcgagcaagtgtaagatgtctgtgggaaggagaagctcctgaaatgaacgttctgcaaacagaaggctgaggggtcttccaggcatgtccagtcact

SEQ ID NO: 139468 - DNA, 1794 bp, Homo sapiens
ggctgctgccaaggggagctctttagttttacatgatgaccttgggtgtgggaaaaggaaaagatggcgggaagctggggggtgggacagggacgatgacatgccgcagctgcatttttatttggaaactttggagaaagtgttctcggctggacctgcattctgggttacagatgagcacgactagccctttttatacaccctccccctttagatagtgacgaagtgatgaattgaactaatagtacgggggtacctgctcactttccagatctcccgtgttgtaaagccgtttttttagtaagccaaaacacatcaacaatagtgacaatttcagatgtcccctacgtatagttctcctgctttggtcttgtgttcagcagtggtaagagttgttgtttttaattgtgttaacagttagcagatgaccagatagtcttaagtcatagatttcaagcttctatcacccccaccaaatgtgtcctctctctacccttcccactttgtgattgtagtttccaaaacatagcagttctgtaaacgtaacactgagtaccctacttgggtcggctccatttggagcacttgatcgcttttgagaagtaactcgcaaaccagcgcgcttcgtgctggtcaaaagttaaatgacaagcgacaatgaagctgatttctttcctactctgccttctgccactggtgtccggcattgggggaaggggacttcctaacagcaagtgtagttttagttttgctctgcctttggtacgtcttgtacttcttgtcaattcctccttgcttttcctcattgtatttctttgtttctcttttatcacagtcaggatggctaaaggtgaccccaagaaaccaaagggcaagatgtccgcttatgccttctttgtgcagacatgcagagaagaacataagaagaaaaacccagaggtccctgtcaattttgcggaattttccaagaagtgctctgagaggtggaaggtatttttctttggtacccttcaaactagtcttagttgggtttcttactttggggttacttaccttcagattttctcccagatagctgcttgcttcctcttttacttttacttagaatcatttttgcttgtcttaagaattttgtgtgtgtgcttttatttttttaaggccctgcacaggtttcaggcctttacctacccccttttgcaagtggttctagcaactgctagtttaatcacaagaaactgaataggtatgtgttcactgcatcgagggatttaacgagtcctgttctttgcagacgatgtccgggaaagagaaatctaaatttgatgaaatggcaaaggcagataaagtgcgctatgatcgggaaatgaaggattatggaccagctaagggaggcaagaagaagaaggatcctaatgctcccaaaaggccaccgtaagtgactataggattcaagataacaattaataccttttcttctgcttggaggatttggttttttggtcgtcctgtatttcatttcaaaatgaaatattttttaaaagatacttaaaagatggcaatacctctgcaaaccattctgtacttgggctttacgatgcagtgccagcgttgtctgtggttaaggctgaagtgtttgtgggctgtgcttgcacattcacagtggttgtctgttggcctttccattgtgaaggaggcactctagttttggttgtcagggtccttgaagtatgttctttatgcctttcctagtaattgaaagactgggacagcaccatatatatatgcgcgtatata

SEQ ID NO: 139469 - DNA, 1026 bp, Homo sapiens
aaatatataaaggactattacaactcagcaataaaaagacaacccaatttaaaaaatgagcaaaagatcttaacagacatttctccaaagaagatgtataaatggccaataaacacatgaaaaatcctcagcatcattagtcatcaagaaatttaaatcaagactataataggatactacttaacacccactaggatggttataataatgataaaaaagggagctctttcctttcgctgctgcgactacagccatgagtatgctcaggcttcagaagaggctcgcctctagtgtccttcgctgtggcaagaagaaggtgtggttggaccccaataagaccaatgaaatcgccaatgccaattcccatcagcagatctggaagctgatcaaagatgggctgatcatccgcaagcctgtgacggtccattcccgggctcgatgccagaaaaacaccttggcccactggaagggcaggcacataggcatagataagtgaaagggtacagccaatgcccgaatgccagagaaggtcacgtggatgaagagaatgaggattctgcacctgctgctcagaagatactgtgaatctaagaagattgatcgccacatgtatcacagcctgtacctgaaggtgcaggggaatgtgttcacaaacaagccgattctcatggaacacagccacaagctgaaggcagacaaggctcacaagaagctcctggctgaccaggctgaggcccgcaggcctaagaccaaggaagcacggaagcgcagtgaagagcgcctccaggccaagaaggaggagatcatcaagactttgttcaaggaggaagacaccaagaaataaaagctcgccttttgtctgtacatactggcctccgtgaatacatagatcagccattaaaataaaacaagcctttatctgcttgccaaaaaaaaaaaaaaaagataaaaaaggaaaataactagtattggtgaggacgtagagaaattacagtcctggtacattgcaggtgggaatgtaaaatg

SEQ ID NO: 139470 - DNA, 1033 bp, Homo sapiens
gtttttctctaagatggtggcagcatgaccctgtctcattgtgaaggctcctggcagggattttgtgctcactgctgtctgtcttatgttcgcttctttctcagagcatttctttaaaagaattctggaattataaaaggtcataatccagctggccttcccctgcaccttaaatgtgtagatttctgtacttaaaccacttattcttctctgtctttcccctttctccctccctcgatatgtttttcaggcaacatcttcgtggtcagtctctctgtggccgatatgctggtggccatctacccataccctttgatgctgcatgccatgtccattgggggctgggatctgagccagttacagtgccagatggtcgggttcatcacagggctgagtgtggtcggctccatcttcaacatcgtggcaatcgctatcaaccgttactgctacatctgccacagcctccagtacgaacggatcttcagtgtgcgcaatacctgcatctacctggtcatcacctggatcatgaccgtcctggctgtcctgcccaacatgtacattggcaccatcgagtacgatcctcgcacctacacctgcatcttcaactatctgaacaaccctgtcttcactgttaccatcgtctgcatccacttcgtcctccctctcctcatcgtgggtttctgctacgtgaggatctggaccaaagtgctggcggcccgtgaccctgcagggcagaatcctgacaaccaacttgctgaggttcgcaattttctaaccatgtttgtgatcttcctcctctttgcagtgtgctggtgccctatcaacgtgctcactgtcttggtggctgtcagtccgaaggagatggcaggcaagatccccaactggctttatcttgcagcctacttcatagcctacttcaacagctgcctcaacgctgtgatctacgggctcctcaatgagaatttccgaagagaatactggaccatcttccatgctatgcggcaccctatcatattcttctctggcctcatca

SEQ ID NO: 139471 - DNA, 1068 bp, Homo sapiens
gataaatattacacataatctatgaatagcttaatcctttatatattccttaaaataggaattcctcgacatcactcctggccacactttccttgcctgtgttgttgctatgtgtatttgaaagtaatatctgcattccttttaagatgttctgtaagtcatatttgtcagttatacagagtagtcttccttttccccacgttcagtgtaatctcactgaacagtaataatagcaatagctaacaacatctgcacagcaccttacagtttgcaaagaacgttcacacattctcatttgagttttgcatagtgaacctgttacgagatgtctcttgacgtcgatgctaaaagtgttagaatctttacatcactagagtcattgaatatgctgtagtattgaatagtgccctgactagggggaggatttggatgtgctgcatttcaagccgtgtataatcatcaaaatggggggcttgagttctttagctacttgaatccgatttacttctgttaagtgatgcttttctaaccgttttctggatggattttgtattcactatattgtagcttgtaatttgtataaatgtaccatctgatgtcattaaaaaaagtgtttgtagtgctactttgctgtgtcctgattcaattaatgttttattaaccgctgtgtttttaaaaatttgtttgcctgcttctcattttataacatgtagaatatgtacagagctcactttaaaaaatttgttcgttggcctctgtttgtgctatgtagattatatagagagctgtcaaggataagtttttatgcagtaaatgtcaaccagaaatgctcaaactgattgggagtgtgggggaggggtgttgagctgtaaagggctggttatacttcgtctggggtgggcttcaaatgcccctaaaggagagttgagaaatgtggaaatagataattcctgacgacgtccacatgccaccccctcatgaccaatgtcctgtgtcctctgtcctctaatcacccgttgattgcactccagctccttcctgtgcttctgaggactccagctaattctt

SEQ ID NO: 139472 - DNA, 1023 bp, Homo sapiens
atccattgtacagggcagacccagtggacctggagttctcggtggatcaggtggactcagtggaccaggagggcccaatggaccagcaggacccagagaacccagttgccccgttggaccaggcaggcctgatggatccagtggatccagaggactcagtggacctgggggctgctggcgcaagtgctcaggtactctgaaagtctcgcttcactcgcttcacgtttgtctggatagctaaccttgcaaagcccaaattttcactcttgtgaccagtttcacttcacagaaagtatgtttgttactttttcaaaactatatcactatttctgttatactggattttcagatgccgttgagaactcaatggaccctcacaaacagggagattggaggttctctaagtaagaccaaatccctgtgctcttcttaatatgaaatcccatggacactttgtacttgaggaaaagtttgagccaaataagaagcttagctgctaagaaaaggtggtatttttaagagccctgcttttaatcacctgtgagagcatgctaaccatctagagggaagacaactttctggccttcccataccaaccctctccctgcaccacaagctaggttttcccagtggaatttttattaggttagaacatgcatttcagagtcgttagatatacccaaccttgaaacatcagtaccaatgtacagtccacggccaaatcaaaatggttggattaactactgtgtagttcctctaccctgaaatgtgtgtacataaccacagatttcgatgatcatcttttatattagacaggattattaaaatcaggattagaagccaagctaatgagttgatggtcagttacctggaattgtgtgcgttcatcactgagcctaagattgagtgactccggttcaaaaggatcctcatccagtgaaaataattaagggctagaacacaattgtttgagtttggccccagcagtgtggccttggcaaattactgagcctcagtttctcc

SEQ ID NO: 139473 - DNA, 1083 bp, Homo sapiens
ttccttccttccttcctccctccctcccttccttcctccctccctccctctctccctccctctctccctctctccctctctttctctctttctctctttctttctttctggctttgtaacccaggctggagtgcagtggcgcaatctcagctcacttcaatctccgcctctctggttcaagcgattcccctgtctcagcctccagagtagctgggactacaggcatgcaccgcagcatgcctaactaatttttgtatttgtagtagagatggggtttcaccattttttggtcaagccagtcccaaactcctgacctgaggtgatccgcccgcctcagcctcccaaagtgttgggattataggcatgagccaccgcgaccagcctaaattattgatttatatcctacctgtttgccaaaaggattaggtggcatattataaatgcacaataggacactggaaacataaatagaaagctgtataccacatcgcaggacagaagcatatgtgcttaacagctgggcttccagggtgcctgtgcttgactggcaatagtgacgctgaacttcctggcagcctaggcaaaaaggagggctcaatggattccacagttcacgtgtcttgcatccagttagtcatcaaaccagagcttctgcttggggaggggagcagtggggtgattgctcccagatgtggacagctcagcaagggctctagaatgtgtgtatgagtgggcgtgtgtattgtggggagggacagagggagcagtgtgctgtgaccatggtttaagtactggctggatagctccttagcaggagaaaggctttctgacaatagctcacattaggggcaactcttgtagttagcgtctcagtgtcgggcatctaaattcatgtcttggcactctactgccatgggctttaatgcaaagagagaagagaggcctggttccagaagattccaggtatcttgcctctttgtctggtgaagatgaacacagcgggtcacctgggtttgggccttctgattatgcctgggaatatgaagaatgcagcattgttgtgcatggaggatgagaccctgt

SEQ ID NO: 139474 - DNA, 1940 bp, Homo sapiens
tggtgtcttgcctgctcactcggccttgtttccctgcataattatgcttcagttgctgggctgggcctggtttgaaggagcccctgggcatctccccattccaggcctcagtagggctctctcctcagtgtttctggaggccaaggatgcccattcggtcctgaaacgattccctcgtgccaatgagttcctggaggagctgcgccagggcaccatcgagcgagagtgcatggaggagatctgcagctacgaggaggtcaaggaagtgtttgagaacaaagagaaaacggcatgtaccaccctggggctggttctgggagtaggagtagcctcaggaatagcaagaacaggccctggtaatgcagaccaatcagaagcaaggaaagacacccagcctaaggcatagccactagggccatcacggagcagataaagtacgtacagtcccattgcctgactcttttggggtcctcctcacttgggagcattgtcctttgcccttggtacattctgctgcctctctggtaactctgtgagacaagtcagatggggaagggtaggaagcaccagagttactgaaggcctctgagcccacctggagcttgagcttctcttaagtaccactttttcttttgcagatggagttctggaaagggtacccaaatgcagtctactctgtccgagacccctcgcagagctcagatgccatgtatgtggtggtaccccttctgggggtggcactgctgattgtcatcgccttgttcatcatctggaggtgccagctgcagaaagcgacccgtcaccacccctcctatgctcagaaccggtacctagccagtcgcgccgggcacaccctcccccgggtcatggtgtaccggggtactgtgcatagccaaggggagccttctgggcaccgagaggcagcgaacagcccccaggtggtgctggggcccagtcgggggggcaggaccacagtccggctagagagcaccctctacctccctgagctctctctctccagactgtccagcaccacccctcccccctcctacgaggaggtgactgcgccccaagagagcagcagtgaggaggccagcgtgtcttacagtgacccacccccaaagtacgaggagatagtggccgccaaccctggcgctgacaagtagtgggacgtttgtgccctgtcctggatgaacgcctctttccgaggtctcctattttctttttaactttttaaagactgtgccaccacaaaacagccttagcctccttgttgccaaataattccctaactgtggagttttaggaagtcagttgtcagagacaggtggggagggtgggggtagggaccacgcatgagtcgaagcccccgggaagagccaaaggccaaagtgcccaactctttgggatgacccccaagcctccaacatcctgtctttccatcaggaactggcttctcttatgccaaaggaataaccccattgagttgattgtggccagaatgtccacaggcctggcctgggggctgtgggactggctggaggcctgcctgtgtctagagctctgggcctcaggggtaagggaaggaagccagcctttcagcaccccttaccctccacagttctgtgatttctgtccttgcttacatttggaggacagggacaaggactgagcaaaaacaaaatgaaaaaatcatgacaaataaataattaacacaatagaacaaaactctagcacccgggccgttcataggaggccaagggaaatttatcacatggatctgtgatgtccgcctcccctaaaacctgtccccacactcctggaaggaggacagggtgtgtgaaggatgagggccagagggctgggtggcagagtttcctcttccacattgaccaaggggcccacgtggactctgccattcagtttctagtgtgcttgtc

SEQ ID NO: 139475 - DNA, 1025 bp, Homo sapiens
gcccgctgcctttggcatctgagttgcagctgggtggtaatgggagagagcaggaagaggcccaaggcctggcccatggagggcaacatgtgtccttcaggggctgaggacaggccgtgggaagagtcacaggaggttgcttaaggcctgtgatgttcggttcagatgcttcatggtgttctgccaggtggggttgcaccacggtctctgggatggtttctgcagcacattgtagaaaaaagactgtacagcacacagcaggcatcactccttgcgatgcacacttggattttatgaatgccctgtacatatcttttcaaactctgtgtttgtatggaggtggatttgatacaatgctgactctttcgtggctacatttttgctgtttttggacttctatgtgtgtgtgtgtgtgtgtgtgtgtgtgtatctatgtgtgcacgttgccttttctcattgcttatctgaaacaatagccggtgtgcagctatatttgtaccaggagggatccggtctgaaaagaggaatgtcacctcccctcgcagggctgagtagcctgatgacagggccctgagcaaggaaacgtggcattaactatattggacacccaacccccaaagttgtcactgtttgcctccttgaaaaaggctttggaagaagacaaagcagctccattctgcaggtctccaccctatgcaacccccgctcacacgcccttttggcatggtgcccctggcccaggcttctgttctgtgggtgtcagcagctgaaagaaatctgagtactcctgggcatggttttttttttttttttttttttttttttttttttttttttttttttttttttttttgtgtgtgtgtgtgtgtgtgtgtgtgtgtgtgtgtgtgtgtatggaaagatgtgtgactattgactttgggtatcgcgggactagttaattagatgtttttcatttttcaaaaagaaaaggttttaaaaattttcttgaaatgtgactgtcacttgttttcaaccaaaaactt

SEQ ID NO: 139476 - DNA, 1040 bp, Homo sapiens
cttaagacaattcacagtagctgtgattctggctacataaaaatatttgaaatattcttccctttagtcaatgttcagggtcttttgtgtaagagaaatccagtttaaaatgagtacccttttcaaagaaaaggctcaagatattaaggatcccttcaccgtgccttcagctttgcagttcagcacttctcgtatgtacagggtgatctcttgttctctctccatcacagggatgttggatattgcagcctttcactctactccgttatttatcctgtgaataacatagtttgtgaactagactgcaatttaaactaatacacatgatgtatctttctaaatattctgtaaagcagatgcttcgctgtcagactggccgctccatcattcgcctccaaatattcaaacgtgggagcttttcctttcagactgtgggcagcgagtctctctctagcaagaatttatctgacaaacatacccaaatagcacaccctctcaagctcaatgcctcaacagttgtttcactgtactgatatctgactgctgaacagtgcctgcccttcacccacccccagcccgagcattaacacagatcttcaggattgggacaaatcccccagctgcttttgcctctcaatccatctcccctcatcgataccaatttcccaggcctgaacacatctgttattttgctctgacattgtgaatttgtgacagtggaaaccctgatatgtgcaactgagcttatagaaataattactgtgaaatggattaattttgataccactttaaactgtgcttgtattcatgtgttgacccttgtcagctgggaaatctgtacattcagtatatgtcagcatttcattggagcctgggggcaacagacaaacttgcttctgatttctctctctctctctttctttttataattgttgaatttggctgttacattttgtctccttctttacaagaaaacaataataataaagagcaaatggcatccacttgaatcctgtcgtcatccatcttggatccctgct

SEQ ID NO: 139477 - DNA, 1042 bp, Homo sapiens
tattcagagctgtagtctttaccctagtgataagcgaaggccaccaaggggtgccttaaggagcaagcgggcatggccaggcatgctctgccagccatgtggaaaacaggctgcaggagccgaagaataagagaagtcagggaggtcaggttattgccatcgcccaggcaagagacagcgctgggatggatgaggctgatgacggaagagacagagagagatagactgttgagaaggtttttactcaaactttgatgggcacaagactatctgattgcttagaatgtagatctccagaccccaccctcagagtctgataccttgagtccagggttgggccagccatgtgcattgtgaccaaatcactcagttgattcttctgcaggggatctttgggtcacattggaagaaacactgaattctctattcaggaggcagaaccatgcatggtgactgattgcgttgggaaggggtagtgaataatcccagaggactttcaggtttaggggctcagacagtagagtagatggtagggccattccctggaaagggtcacagttgaggaagagcaggtttaggggagcaaaagaccacaggtttgagttgacgtgttgcatgtgtggtgtatagcgcatttgagtgtagttgaggagggaggcctaggctgcaacaggagagatcagaattgcttgaggtcccagaaagacaacaagtggtcttgagtgtggacctaatggcccaggagggaggccagacaggtgggaagaaaagcactggcatatggagccctgaaaaccgaaggactagagtgtttctagaaggagacagtggacaatgatgtgaaatgctttcaagaagccaaggaagatgacagccaaagtgaactcattgtatggagccatcagggggtcatcggtgacctcggcaaggggtgatttcagttccatggtgactgaagaagccagactagaatgagcagtgggatgcctggaaggtaacaagtggagacagtgcatatgatggaggcaacactttccaggag

SEQ ID NO: 139478 - DNA, 1151 bp, Homo sapiens
cctcagcttttcccggataggtggggacccatcatcaaaagtgacagagaagataaggcccaggggctttcaagtcactagtggttccgtttagtagatgattgtgcattgtttcaaaatggtgccctagtgactacaaagccccagagccagcatcatcatcaaagcaatgacagtaggtaagcaccagacctccttgggagtgaggaggattcttgaggagaaaagaggtcttctttctcctctgctggagactagttgatctggagacgtggttccttcaatgtcagagttatctttgggactggtctcaaactcttccagttgggccctggggcaggtctctccatctggagcatacttacgtgctcggcgattaagggttcagaatgcagtggtagcctgctactctggccatcttggaccttgatccagagaatctctgcttcaggagcttctaagagagtccagccctgcctccagagagaggcttgcccttcactgatggctgtggagcctctgatggaatattattgctggtcaggaattcactgtcttacaaggaggtttccttcttctctagacagttctgttcatcaaaaaactctccctgttcttctgaaattggagtctctggaagttccacacattaagcttagttctttttccttggaactgtccaggttacattagtccagccactgtttcacaggaccgagattaaacgatcaacatcatcattcccggcatggatcatagtctgttgtagtctacatagccctagtttatttttcttcccttattcttcaaagctttgggtccattcattcttctagtcccagtcctctggacatggtctatttaattgtgtccctctgacactgcagtgaccaaccatgatctggtcaaagaggataagagtttgagcagaaaaccatctttagcatatatttttttgctttggttcatcagccccagatatattgttttccttacccgtgcttctctcactcctcaagaagaagaaagtgtgtgttagcatctttctcttgtccttcaagacaaattggcatctcttgacgagcggagaaggttcttttttggccagaataaataaaattaaaatagaatcatccaacagaataataaat

SEQ ID NO: 139479 - DNA, 1602 bp, Homo sapiens
cattgaccttgatcaagacttttcccttctctcgccctcagtttttccagtggtaaaatgagaggactaaactagattgttgatcttcaagatgtgtgtccaattcttaacagtccgtgagcttggttttgccatgaaagaataaataaagaaataggattagatgctgaaactgtgtggtccaacacttacttgactcccctttcatcccctctgaccacttcctcccccgtcccatgcgcctgtttgacacttaccctctgctgcttctgcttcccttatagagaagcccactgtggtcactgttgagatctccgtcaacagccttggtcctctctctatcctagacatggtgagtactaagcttttttagtactatttcctagcccaggggctgacctatgggaccttccacagacttctgctttctgctctgtacttctgtaacaactccaataatttattttctggagggagaaagggattttttaaccactggtttgagaatgagactggaaaaggtaagtcccttgctacttgaagaggatcttcagaatcatgaccatatcttccagttttttcattcaaaatagaaataataaagcaatgttaaacaccacaatggactgcctcttttcttctgataattattgtatggacataagtctaaagttactagctcttgctctaagactgttctatatttttgctctacttccttctttccttttccactcgtatcatcatagtgtcagcactgcccccatttggctttcatcatctcccacctagaatacacctactccacctactaagttggcctcccaagtgatgcacctcctgcagtcccagcactgcttactacatgcagttgaaggccctccatggttgtattcctcttcacccttttagagaccacgtgctttggtcacactagaatattggtgttcccagaccaccttgtacctctgagctttcattcaagtgatcttctatttggtatgccattgttccactttcttacttgtcagctgccttctttttcagtatctagctcagacagcatctcattcatggcatctcccctgacctccacacctgttaattgctcctttctttctcataccacattcttctcttcggcagttacatctttccagcttatatcacaggtgtttacctgatcttgcctacatcatttcattgtaattatctgtggtatgtcggccttgctgtcttctccatgaactccttgatgtcaagggctccatatatgttagctaagcaaatgagtgatgaatgatgctctgcaagaatcacttgcatctgcagagcctgacactgaggaaggctttggtaagcaactccgtcacagccacagacatggcttggcccggggcaaacaaaattttggcatactcacaggtactcaaaaagtgccatgtgactgggtgagttagagccttggctctgagatgggccttgcaaatagaccctcaatgctaagttaaccttcatggaaaatcaaggtgttcgcataggctaagtggaaaagcaaggttccccactcccaaaccatgaggctttggctgcctgattctt

SEQ ID NO: 139480 - DNA, 1087 bp, Homo sapiens
acaccctccctctctccccaggcctgtgggtccccatcgcccaagtcctgcccacactcccacctgctaccctgatcagagtcatcatgcctcgagctccaaagcgtcagcgctgcatgcctgaagaagatcttcaatcccaaagtgagacacagggcctcgagggtgcacaggctcccctggctgtggaggaggatgcttcatcatccacttccaccagctcctcttttccatcctcttttccctcctcctcctcttcctcctcctcctcctgctatcctctaataccaagcaccccagaggaggtttctgctgatgatgagacaccaaatcctccccagagtgctcagatagcctgctcctccccctcggtcgttgcttcccttccattagatcaatctgatgagggctccagcagccaaaaggaggagagtccaagcaccctacaggtcctgccagacagtgagtctttacccagaagtgagatagatgaaaaggtgactgatttggtgcagtttctgctcttcaagtatcaaatgaaggagccgatcacaaaggcagaaatactggagagtgtcataagaaattatgaagaccacttccctttgttgtttagtgaagcctccgagtgcatgctgctggtctttggcattgatgtaaaggaagtggatcccactggccactcctttgtccttgtcacctccctgggcctcacctatgatgggatgctgagtgatgtccagagcatgcccaagactggcattctcatacttatcctaagcatagtcttcatagagggctactgcacccctgaggaggtcatctgggaagcactgaatatgatggggctgtatgatgggatggagcacctcatttatggggagcccaggaagctgctcacccaagattgggtgcaggaaaactacctggagtaccggcaggtgcctggcagtgatcctgcacggtatgagtttctgtggggtccaagggctcatgctgaaattaggaagatgagtctcctgaaatttttggccaaggtaaatgggagtgatccaagatccttcccactgtggtatgaggaggcttt

SEQ ID NO: 139481 - DNA, 1002 bp, Homo sapiens
gctgctcccagtgcctcctcaaccccaacaatcattgcttcacccaaggccacctacgtgcaggacagcccgactgagaccaagacctacaacagtgtcagcaaggttgacaaaatttcccgcatcatctttcctgtgctctttgccatattcaatctggtctattgggccacatatgtcaaccgggagtcagctatcaagggcatgatccgcaaacagtagatagtggtggcagtgcagcaaccagagcactgtataccccgtgaagcatccaggcacccaaaccccggggctccccttcgcgtatttcaggattctcctttttacccctctaccaagctgtgaccctcaattcatatttatgaatctctacgcaaaaaataactacagaaaaattacttgtccctccaatattgcccagtataaccccatcaaagccaaacactgccatttgtccagttgctcatcttagtctgccaatctcccctagctgagggcactgcatgtattttattgcactctgcccgctgcaaaaagaacaagagattctactctccatagtggaagccttggctgtttgagaggcccagaacaaggagaattgttgactcccatctagatcagatgactctaacttactaggcagccaggttaggctaggccatgtgatcctgcgtgccacctcccctgccttcagcaaggcctactaggcataagtactgatagcaaaggtgggagccagttctacacccccaacccatttattggtttggaaattagtggggacaattggtactaaccaccgtctaccatgtatggccaaaataaatagaactagctctgccagcctggcaccaagatggctggtgccctgccatgtccagcccctcgggaaaatagtcccctccttggtacatctctcctccagaaaatcttcttcccccactgcctttggcacccttgtagccaactgagcactacttaatttggactcattaccac

SEQ ID NO: 139482 - DNA, 1091 bp, Homo sapiens
aaatgtacgataaaatgtaaggttttggttttgtggcgatttttatattggcctttgatgttcatatggggtcattaagcagtagagacaaggtaagaaacttgttcttatttgggtgtcactgcatacaggagggagcacttgccttttcataaggcaaagtcttatgatcagcttgtgtgctgtgtggggatgtgttggcagttgtcttccttaaaaatgccttgtcaaatatgttatccccatgcttattaatctccatggcattatttctcaatcataatcattttccttacacaccaggagctactgttaatagactgctgcttctctgcatcagaggaaatactgcaaggtaattaatatttgctaagggcactatgagcccttaccagaactcaactgaaacattgttttctctcttttcacccctaggagtacactattgatgtattttttcggcagacatggcatgatgaaagactgaaatttgatggccccatgaagatccttccactgaacaatctcctggctagtaagatctggacaccggacaccttcttccacaatggcaagaaatcagtggctcataacatgaccacgcccaacaagctgctcagattggtggacaacggaaccctcctctatacaatgaggtcagagagtggtggttcccacccaaagtatattgggagtaggactgggcttgaaagcagaatgttttagagtatccattgaaaattccctcaagtgtatagattagaaatgtacaggtatgtatatacttcctaatacaattgcatgcatacatactcacagacatatatattctaataaacacataaataaagagttgcatagatgaacattttgagaaacacagaggtatacattcatgatttgtatatgcatgcatacctaaagacacatgtggactaacacagaaggacataatgtattcaaggacacttaaatacacagattcacaaaaacatacacacaggcatgaacgctgataattagaattgactaggtttaactgcaacaacaaactatccctatgatgcagagttgtgagaatcaaatgagat

SEQ ID NO: 139483 - DNA, 1031 bp, Homo sapiens
gtgtatcaaatgatatcagttgtctccaaatatgggacaattaacccccccaaaaattatttctcattcatgcaaagtctattgtggatccaggcaactctccagggcagtgctcctccatatattagctcatcattccagactttttcaattttattgtagcaccacagcaatgtgtgtttttacgatcatcatggcatggagggtcttgcattagacatcaattgttccagccatgagagacacatattactttctcccacatccagaaccattcctattgcccctctatattttaaaaaggcaggggagtggaagaacaatcatcctatgttcctagaagtggaagagtgttggatattgcaacatttgtaacctactacaggtaagggtaagcccagtgagagctcagctcttgtgaatgtcagggatctctaagggccctatctaagctttgttgttttggtattatgctgtcattttcaatgatactaaagggatagactttgagtctgtacctagcatgttccctgtgaagagatagcacagatgagaagtttttgaggggttttcctttctcagaagtagtaagttggctgtcattcagagtactgcactggactctctctgagctaagacaaaagcctttcctgacattctgcttttctactttctttcacgcagatgcagtgactgaagtgaagactgacatctacgtgaccagttttggccctgtgtcagacactgacatggtaagttcttgcaaaggtaaatgtaaaagaggatgcactagaccaaagaaaataaattggagctttcctaaggcagggccttgtagctatattctaaggagtggtcttttctcatatgaatttcctaccctcgccaccctacgtttagccaaatccatctttgccctgctctccccacctattcacatataatgtatatacccctttcaggagtgcccttatctttctcccacgacacatctttcaaaagtttgtttggttccctatccttaattaaag

SEQ ID NO: 139484 - DNA, 1039 bp, Homo sapiens
atcttcatgcttcagtttcctgcaaaatgacaaaaaaagtagtaaggttattgtgaggattgtataagctattatacataaaatatttttaatactgcctggcaggtagtgatgatgatgataacaatgatgatgatgatgatgacatgacaatgatgataatgatactgtgtcccttgatcgtgtataataattgtcagctcaaattctggagttctctaagtgtgcattatggtcaaatgctgatacttgtgatagtgtttaaagcatcattatataagtatatgccatggcagtcatttgaatcgttgccatctgtagtattctattagctactgcactatcgttttctgctattttattatcagcatcttcttcaatatccttgttcatctgctcctatattatggtcatcagcttatttttgttgggatatctgggtgtacatcgtggtttaacagtcaaatattagtgttagttgctcatgcaccatgattgcctgagtatgtgccatgatatctcctccagcatcattgtcatatgctgtttgcctaaataagttgtattcatgtgttatgtttcctttattcatatgtcctgtccatctgggcatattcctcattgtgttattcactcttgtatcacacccacctgcttttatattgtaggtttttgctcatgcaccatggttgtctgagcatgcagcatgcttgtctgctcataccccatggtttctgagcaggaaccttcattgtctactgctttacagggaaatagtgttttatgcatcgtgtatatgagtttagtatttactcatattctatgactctctactcttagatcacttctgcctttttctgcacattgtttatctgttccaaaaagacagatgttatctcatgtcactgggctttctaattgtacatcagtcaaatgcttaaatgcctatgatgtgatggctgttcatgcaacatggctgtttcagcatatatcataacttcacccgtttaatcattgccatcttctcccagactaaaga

SEQ ID NO: 139485 - DNA, 1018 bp, Homo sapiens
ggagcctttgaatagttttaagcaagggagtaaagcaatctgattcgcatttttatggccccctctggttgctgtgtgaagaataggttaatgctgcagaagggcggctgaagtgaatgtgaggccagtaatgctgctttggctaaaatggtaatctggagaaagagagggagggagggagggagagagagaccatgggtttgagaggtatattggaggtagattaatagaagtagtggaaggaatatttagcaaacactaggaagtctggctgaacttgtacttttccctgcatttccttctttaaatttatttcctaccagttttcctgacctgtctcactcacctatggggactcagatatcgttcttacctctcttttaattcaattctttcatatttaatctccaatcttctgctttattccagtgacacaagggcttggctgtgttcttgtgctgggatcccataatcagtcactccattttctttctttgctttccacattggtgacccattaagtgcattcttcattttcagtggtctattgtttttcttcaatttctggcttgctttcaatccatctttctcagttttcagctgggactaacttgagaaaaaacctctcttgctcttgagtagtgggtgtatgcttgccaaatgtttgcaaaaaaagtatctcattgtacaagtggcattccagctgcattaacacccaagcagaaataagtaaatactcaattttagaactcactgtcatctttacttgtggagtgattgcctcctgctttctgagtgcctgtttaggaatctataaatgacacagtttccacaagcatttggggatcctgggcagtatctatgctacaacaatgctcctggttatatgctcagtgggggctggaggctgaaattggtatatattaatgcaaccttcctctgtttttgtgtctagtctgcagattctccacttttagataaaggcaggttgcctgaactatgcacattgcacattcct

SEQ ID NO: 139486 - DNA, 1056 bp, Homo sapiens
tttctaatttcatgaagaaaagtaccacatttgaaatagtggtagttcaaggttcatacagtatgcagaaggtagaagaatatattgttttatcagaaaacacctcaggaataattacatcactgaggggatacaatgcagtgggactgggtggaaaggggtgagtatgtggttgctagaatggaacactgacttggctgttagcaaatttgggttccattcctagctcagatgatttgctgattatcttggacatatgacttcccctccatgtgcctcagtttttccatctgtaagatgttgagatggactgtgtctctgagggtctttcaactctgaaattctctatctgaagtaaattataagatttcagagttatgagaggcttcggaaatcgttaggccagtgcttctcaaactttaatgtgtaaaaatatctcctgggaatcttgttaaaatgcgaattgtgattcagagagtctatggcaggggcctcggattttgcattttagcaatctattaggtgatcctgaaactgctgttccactgaccacacttcaagtagcaaagctctagtagagtactggtcaaactcccctagtgaaggaaaatgtttgttgtcatttgtttgtttgtttcctaatccatcacagaagactgttaatttagtaaaataaattaaccatgaattactagaaaatgaaagaaaagacatacaaaagataagcccgcatttgtattattagattctacagacataaaatgattttttcaaattgctgtaacattttctaagtgcttactcttgacttctgtactttggtccttactgcctggtaataaaagttcacagacaggcactgatttggcgggctacattttgagtgcactggtctaggctacctgcccatctaatttaagaggcccaaattagacccagctttaatttctaaatcacctgtcatgatcttttaccctacagttaaatatctcctttaatgaagaatttaacatttacacaaagttgcattgttcatgtgttgtgacagataaaatg

SEQ ID NO: 139487 - DNA, 1051 bp, Homo sapiens
cctactctcccgggaaagagctcaaaggaaagactggtgcgctaaagccgagaaaggcgcaggagaggcggcgtggccgagctggggcctgggaagggctcagccgctgggcgtggggcgcgacagagcggcagcactcaccatagccaaaggagtccgctgccggttgttaggcaaccgacgtgtacactgactcggcgccgttcccaccgccccgcgcgcgcagccccgctccccattggccgtccgctcgtcgccgcctctccctattggtgcagggccgaagagggtgggactaacctggcaaagccccggcccagcgcggggaggggcacgctggcgacagagccccgtctttattgggcaagatcacgccgtgagcgccaattggctgagtcgtcgccgagctgggccaatcctcttggtggaggaagctcggctgattctcggctcacgcgggaggggagtaaagggtggcggtccgggcctggagttcagtgggtgcagcctgcttgcgagctgaggccagacaggggggcgcctacggacgggtaagagtcgtggccttgccattggaggtcaccctgtgtcagcgactgggcagtgcgggagggtggggagctacggggtcgcccgggtcgggtgctttctgggttgacctaaggctgagtttagggaccgagtgcatcagagcagccagaaacgattaccttgcgtgttggagcagggactgtactcacggggcaactgagacccggagaggggaaggggtgtgctgagtgttgtcgcagaggtcggacggctgggacctaggaactgaatccagccgaggctcgctctttgagggtggcccttcgagagcacccctagactgacccagatgtataggccccagaccaggttccaagagaggatcactttagatcttacctggctaaaagcagcccaggacggtgaactggggcctttgggaacggactttgaaaggagtgagggggatgtgagcgagcatgaggggcggggagaggtcatcaaaatatactctttttga

SEQ ID NO: 139488 - DNA, 1025 bp, Homo sapiens
tgtgtattcctatgtgtgttcacatggccaggtcactatcagaatagccagtgatctttttcagacatcttcctagaagtttgcgggctgcccttcacttacaacagagaatcgctgtcatagtgagataccatgaatgcaagtctattctatctctcaggtgtgatgggatagaaaaaatgtgttatcccttgttttgaaaccaagatctcttgattcttggttagaatgtaatacatagtgtgtctggaatccacatagctgcaaaagatggtgatctttggattattttaagaaggcatgaaaagcaaaggcattgcagcaaataatttcttcagtgcctcgaatgcgagggcaacaaagggatgcccctgattctctttcatacaggatcatgcactgtttgaattgtgataatttgtgacttttattttttctgaccttcctctgtcagaaactcattttaaccagcagtgccagtgtcatctttgagggcgtcgatatcaagaatggaactgaagaccttccctatgccatgaaacccattgactactacacagagactaagatcttacaggagagggtatgtaccttggaactggttgagtgagcagactgaagggtttagaatcctaagaaaaatgtttatgaacttatgaagtttgtattctgaggcctacgtacctgatttgagatgtaaaatttgtgggtgaaattaaatttaaaaatactgtgagaggccgggcacggtggctcacgcttataatcccagcactttgggaggccgaggtgggtggatcacctgaggtcaggagttcgagaccagcctggccaacatggcgaaaccccatctctactaaaaatacaaaaattagcccagcatggtggcaggcgcctgtaatcctagccacttgggaggctgaggtatgagaattgcttgaacctgggaggcggaggttgcagtgagccgagattgtgccattgcactccagcctgggggatagagagagagagacgctgtctcc

SEQ ID NO: 139489 - DNA, 1049 bp, Homo sapiens
cttttattctcctgaacctctgccgtttccccactgataaccttcaaataagttgggaatagggtgggtgtggcattttttttttctttttttttttttgagacagtctcactctgtcaccctggctggagtgcagtggcgtgatctcggttcactgcaacctccgtctcactggttcaagcgattctcatgcctgagcctcccgagtagctgggactacaggcacatgccaccacgctcagctaattttttgtacttttagtagagacggggtttcaccatgttggccaggctggtctcctgacctcaggtgatctgcccgcctctgcgtcccaaagtgctggggtgacaggcgtgagccaccgcgcctggcccgggtgtggcttttgatttaaaacaagcagaacaccgtcaagaaatgtaatatgaggaattcattgcatccaaagatatgtagatgagttttatgatgattaacaattatcaaattaacaaatgtgcctttccaagtgcaatctatgcttcatttaaaatcctggcccatagatgaaactttcattgtctgccctttctatgccttagcagttgtgcaattgagggcaggccacgtggaaagctgcagcaattaggcagtgagaatgcgatctgcacgggcttaatagatgcttcaactttgggcaggtgggggtggtgtttctaacttcttgttcttgttctcccgccaggcatttcacatcaccaatgatgagcccatccctttctggacattcctgtctcgcatcctgacaggcctcaattatgaggcccccaagtaccacatcccctactgggtggcctactacctggccctcctgctatccctgctggtgatggtgatcagtcctgtcatccagctgcagcccaccttcacacccatgcgggtcgcactggctggcacattccactactacagctgcgagagagccaaaaaggccatgggctaccagccactagtgaccatggatgatgctatggagaggaccgtgcagagctttcgccacctgcggagg

SEQ ID NO: 139490 - DNA, 1062 bp, Homo sapiens
aggtacagtgagtgctggccccctggcttctgcccatacttagcactccaccaacgcttgccacccccgatgtgcagagggcagtctggatgatcttggtgtaccaggacccatatggtcacctgcaagacactacaaatgcatgaagtgacagcatttgcttacctttatccccagaagccctgctgaatcaagtgagaggagagctgcggagcaatcaccatgagtatctcagctcttggaggccgcaccaaaggtgaggcctgggctccctggtttcccaggctctgtttggggctgtttgcttccaagcctgcccctacaggccacaagcactgtcccagcagcaaagggagagcagcatactgggagaactggaaaggaggtcgagggtcctggggctgcattcctcttctgaggcggttggcttttcccaccacagggaagcctctgccaccaggcgaggaggagcgcaataacgttctcaagcagatgaaagtgcgaaccacgctgaagggggacaagagctggattaccaagcaggatgaatcggagggtcgcaccatgtaaggcaaggaggcggggagggaccgcagcaacgtgggggcgcgcaatccgtgggggaccgaccatacctggggatgcgaaggggcttccaccattcagagctccgccaggccatgtggagggcagagcgtgggaaaggctatccagcaatgtcacagggtgggagagcccctgggtgcctgggaaggagaatgtgtggcagaaatggcaggacttgctgggcagcctctaggatggaggccacaggatggcaggtgacagggagtctcggagccaatccttcaggatgcctctttcccccagagagctgccctcaggccggagtcgcgccacatccttttcatcagctggggaggttccgaagcctaggtaagaggtggtgctcaggtggctggtgggtcagccccagggactctcctgcagcttggggccagccctcaacagggaggggtgggcagtccacaggggacagggatgcagccccagccaagggtc

SEQ ID NO: 139491 - DNA, 1050 bp, Homo sapiens
gagggagaaaccatcccaggccactctcctggcttctgctggtggttggtgatccttggtgttcctcggcttgtacctgcatcactccagtctgtgcgtctgtcttcacatggccttctcttctctgtgtgtctgtgtccagatttccctcttcttacaaggacagcggtcattggatttaggacccatcctactccagtatgacctcatcttacctgattacatctgcaaagaccctatttccaaataaggttacagtcacaggttccaggggacatgaattttggggggacactattcaacccagtatgctgtccttatcctgagctggagtcactgaacccccagcctgggccacctcttggccgtgatcctgaagggttgggtcagttagacgccactggaagcatgttctttgaggcctccaagctctagggcagccaagaagaccacgagcgctgtttctcttcttgctcaaagggtggaggtggtggaagaggacgggccttctgagaagagccaggacccacctgctctggcaagatccactcctggctcaaacaggtaatccattgcgctcatctctgcctggggctggtggctgccatacctgccactcagtcactgaggaacctcagtcagggcacctccatgctgggcttcgagatcagtgtccccatgtgcccagtgacaagacgggacaaagaaatcagtaagagcccatctggctggatgtcccagggctgaaaggagcaaaacagtccagccccccgggagagagcacctggctctggtctgatgagtacgtatctgtgtcaccttaacccttgcaccactgagcctggtggcaacttgaacaccccaagaaaaagtaccatccttggggtttgagagggccagccaccatggcagtagcatgccattgtcagacttgctccttgcactccaataagttagccacattcagcatgcccagggaggaggctctgacatctccagagcctctcacagccaccttctttgccagtgcggatggaggcaggaccaaag

SEQ ID NO: 139492 - DNA, 1053 bp, Homo sapiens
caactctagaaagaacacggtggagagagctatagataaggaaccacaaaccaactaaccctgaggtgggaacatgcttagcatgttccaaaggacagagtggctggagcttggccagtgaggagggccacagatggagcagggccttggtaagccatggttaagagattggatcttatttcaagttttaagccaaaggggagtctcatgtgatttaggtgtttaaaaggtgaatgcatgtttgcattttcataccacattgctgttgcttttttacttaaaccaagatgctgggggctggggtgggcaatggatatctaaggtatgaggccttattgtgtttcttttctcattcgaattgcactgacaattaacaatcagagtgaaaacaacagctgacaccaatactgtgctgtgctaggtgccttacagccttcccagcaacttgtgagatgggtaaggtgggaaactgaagcatagaaagattaagtgacttagccaaggccttacaagtggcagaactgagttccaagggaagaggctctaagaaaatcctcaggagaaactacgaaaaactagtttatgaaatcttgtctttggagcctagtctcaagacccagaatcagtaacttacagctggttaacatggttaacatgctgtgtgatctcaccttaattttccccaaacgtggaaaaggataaggcttcttattatgcaacttgacagaggagaaaattgagggactcactcctgtaatgaacacacttaggaacagagcccagatccagccaactctagagccaggctcacgctactttcctctgatgtttaaacgtctgcaaaatcagaggtgttttttttttttttttttttttttgagacagagttttgctttgtcgccccagctggggtgcagtggcgcaatctcgactcactgcaacctctgcctcctgggttcaaacgattctcctgcctcagcctcctaagtagctgggattacaggcacatgccaccacgcccagctaatttttatatttttactagggataggg

SEQ ID NO: 139493 - DNA, 1457 bp, Homo sapiens
gctgagtgggctcctggtgactgtcacattatatcataggtggggaggaaagctctgctgttttcccactggtcagtggggtccccttggcatatacaacctcaggaatcctagccacccagccccgatcatctccctcattgtgaaaggtctcctttgcccccccatagaagggccctgtggcaccaagtcatgaatgacgactggcatcgtagttatgtctcagcttgtggccaaaggttaattagaaaattaactatgatagtgatttggctctcatctctgccctcctctcccctatcaaactccctgcagcgtcagcagcattgaggactcattcgccatggagaagaagcctccatgtggcagcactccatactctgagaggtatgttgactttcttagcacggagcttgcacttctacagaggagaatcagggaagggagagttcctgctgagtctgtttgcttttgtcttctgctttgcagcctccaatccatttgcagaaaggtgaaggacactaccgtagggtggtgcttcccttgttgggatatcacacttgtgacaactaaagcctttgaattgagctaagactagagggtagataccagcggtgactgagaagggaagtggtggcatctgacaacccagaggactcgtgtcagcaggaggggcccttcagattagaacctaatcaatcacttcattaacttgcaaatctaaccagaagtaaaaataaaatgactacaaaagagaggagtgggcagagaaggaagaaaaatgggctgctggcatcaagaagccagaaagacacacaaagccaagaatgcccagtgctgtggagccaccaaattgaaagcaggggcagagaacacctcgttcagcagttttgaaagctgtcactagatgatggcacagtcactagagagtcttaatgacaaagaaatcttatgttcagattcttggaatggggagaagagagtctcagagattgagttcactcaggcttctgtgaagaaaatggaataaatagccttcagtccacagtaagcaaatacggcagacccaggactaaaccccagggccctgactactcccaggttagggatgtttctactctgccatcttgcttctcattgatgggcagatcttaattcatgtggatgacattcagagaccaaagctacattggggaggaaaaggaaggaagtaagagggttaagataaagagaatcctaccgggccccagaggcaaacatataggagcagacaagcatatggggccagggaatctcctccactatagctgaagaagcaggtggttctgagtaactacagattacttggtgaggcacatcagcagatgaagtcttagcagagaagggcaggttggtcagaaacctgagagttaaccacttacataggagcaaatggaatgaggcttccaattctagtg

SEQ ID NO: 139494 - DNA, 1059 bp, Homo sapiens
gcattggtcttcctgctctagagggtagcaggccccagcggataatctaagcagaaggtcagggggaggcaaactgtctggaataagtatcatatcaggacatctacaggagacatgtcattgtgagctggaaaaagatgcatgactagtttttggaaataatgcagaggtctacagcaggctgagaactgatctggcccagggctgtgctgcacaccacagaaaacagtggcatcctggggatcctgacagcaaacctgggcctggctgcaccaaattggaaggtctggctgtgtcacatcagaggtctgtacaccagcctgaccaccgggttattgttcttcatctcacaggacaactggagggatctgtacttactgcaaccgtgagatccgagactgtccaaagattaccctagaacatcttggtatctgctgccatgaatattgctttaaggtaaaaaagaggtggaagacaccttgagctaggcggtaactcctgatcacgtgctgctaagaacgttttgtagagtgcgggagtcttacgggttcagagactgtggaggaggcttgatctccatatacaattgcacatagtcgcagaggctttgcacaactgggagctgaatgagcttccaagtctaagacagtagatgagtgttggtggttctgcatgcttagtactgtagggaagacaaaagaggtcttttcaggaaagactatttctggcagagggccagcaagtgcaaaagccctggggcagaagcactagagtgttctagcttgcgtgggagaatgccaggagtgacagagtgggctagatcatgtaggccttggcgggcacagagtttggattttattctaagtgacattggggtccccattctccacagtgtgtggcactttgtaaccccaggttgttggttccaatccatttagggtgtcacctctgggtgcactgagaaaaacaaccctcccctttgccttgacagaatgttaggcaggcttctgtcctccccacagggcctgaactttgcttgctcctggttaagtaagtgct

SEQ ID NO: 139495 - DNA, 1051 bp, Homo sapiens
gtggaaaagcagctaacatttcttgaggctctaccacatagcaggcactgtcacagagtaatggcattaatccccataataatcctgtgaaggtgatattctcatcccatcttagacatgaggatattggaactcagagaggtggctattgcattgcgcagaacgctacagagcccatgctcttcccagagcagcacccacaaaagcaagcattgattttgtgctcagtgtgtgccaagcactgtgcagagggtacacagttcctgccaggttaacaccctcccttcaggcctcccaaaggcataggcttgcaaagagcagaaggtgtgaaatcacactcttcctctgggcatcctggatccctgaattatccccccccccatgaagtacttcaagggccaagctgcccctttccctcctctccgcccatgaaaatgcctccaaactgagatgctttcagctgagaacagatttgactcacagacattaccaaagaggagcttgtgaatccaggaaaagctccagggggctagctgatctgagcagagagctttcagtgacccattttcctgtctagactctgccttaagctagtggcaactgctggggccccaggtacttgggacatggaaactcgttggatggctgggcagatgtaagcctgtccatgcagtcagccgatcctctgctcaggttcagctggactctgccatctgtgggcccagcatcactctgtaagttccttgaaaggaagaacaaccttagagtatttctgatacaaaatgagggcctctgctcttgatttaattataaaatgtctacgtctttctccagtttctgagccctatgcacattggcttgtgggcttgttcttcctgccaaatgatcagagaggaacattccatttatttgtagtggatttcctctggagggcatgtacccacactaaataccaactgctcttcctcagctgtagtccccaacatcagacttggcacgtggtggacactaacacacaggcactcaatgaatgagtgaaggaaataaaagt

SEQ ID NO: 139496 - DNA, 4235 bp, Homo sapiens
aatcacagcaaaatacctctgctttgccttggacagatccagtgaagcaggacccatcacgcctgagtcaggaactgcctaactggatagagttgaaaagcagagcgagtctgaagtggctgtgttattgcagcatccgcgctgccagcagggccaacccagcaaggtgagcagctgtgagttgggccctgttgggaggggctctggaaccctggcaaagagtggggagaggggactgcctgccagggttcacagactctgcagggtagggccatctctagggcaagagttgttggtttcctgcagtctggcagtggggaccttatctgggtcccttttctgcctgatttcagcttccacacaattgaaaccatgagctcctgtcctttcagcactcactcctcatgcccatctcgccttccctctcccaccctcctttttgctagtacgctttattggttggaggccaatgacatcacctgttgcttttcaaggaccttggccttaccacatgacactcccctgcaatagcaacccatggtccatggtattctctgtatccatggcaacactgcagcttgtcacacaatctccacacccaccactctcattgcattgcgcagagctcagccatctttctcatccgtcaggcattcctgagaaagagggccactctacctctcttgctgccagccttcactccagcaaggagggtgctgggtgacctgagcccacatagccccgagtgagcagtgaggctgtctcctgccctcttctgcctggagggctcgtcagtgtccccaggtgtcaggccctgcctcctgacgttggccttttcactacaggcacccgaagcacacacagcagagtcctctggactttgaggaagaacccacagcaggaggaagtcagcagggagtggtgagatggggagatctttgcctggggagaacctccacactctaccctccccaaaatgacttggggaaccctgggaagaaaggactccatccctgcttgggggtgggggcagaggaggggtgcttgggggcgtaggttggggtgggcattaacaatgctctcatcccatttgctttgcaggctgtgtgaaacctgggaccacttctgccttcctacgtggcagtggctcagagttatttgagtgctgtcaaactgagctgattgctgccctagtattagatcagtccatagaaagtgggagcaatggcactgacactgctagaggattggtgcaaggggatggacatggaccccagaaaggccctgctgattgtaggcatccccatggagtgtagtgaggtggaaattcaggacactgtgaaggcaggcttacagcccctgtgcgcatacagggtcctagggagaatgttcaggagggaagacaatgccaaggcagtcttcattgaactggctgacactgtcaattacactactctgcccagtcacataccaggaaagggtggctcctgggaagtggtggtaaaaccccgtaacccagatgatgagtttctcagtagactgaactacttcctgaaagatgagggccgaagtatgacagatgtggccagagccctgggatgttgcagcctccctgccgagagcctggatgcagaggtcatgccccaagttagatccccacctttagagcctccgaaagaaagtatgtggtacaggaaactgaaagtgttttcgggaactgcttcccctagcccaggcgaagagacctttgaagactggctagagcaggtcactgagataatgcccatatggcaagtgtctgaggtggagaagaggcggcgtttgctggagagcttacgtgggcctgctctgtcaatcatgcgggtgctccaggccaacaatgactccataactgtggagcagtgccttgacgccctaaagcagatctttggggataaagaggactttagagcctctcagtttaggtttctgcagacctctccgaagattggagagaaagtctccactttcctgctgcgcttagagcccctgctgcagaaagccgtgcacaagagccccttgtcagtgcgcagcacagacatgattcgtctgaaacatctcttagctcgggtcgccatgacccccgccctcaggggcaagctggagctcttggatcagcgagggtgtcctcccaattttctggagttaatgaagctcattcgagatgaagaagagtgggagaacactgaggcagtgatgaagaataaggagaagccatcagggagaggccggggggcctccggtagacaggcaagagcagaagccagtgtctctgcacctcaggccaccgtgcaggcaaggtcttttagcgacagcagcccccagaccatacagggaggcttacccccattagtgaaacgcaggcggctgttaggcagtgaaagcactaggggagaagaccatggccaggccacgtatcccaaggctgaaaaccagactccaggcagggaggggccacaggctgcaggagaggagttgggaaacgaggcaggggctggggccatgagccatcccaagccctgggaaacataggctcagaagaccgaagcactccttcccctggcaggcagcagggacatttgaacaaggggaaggggcagcttacactaacagggaacttgactggggcagagggacagggaagccaggtcgagatcaagcccccttactttccaccagctggaagggacttcaccaaccaagaccaaatagcatctggttcagtgggggccgggcccatagcccctaacaggtacaggagacacaagcggggaaccactacacttagcacatggggtgcctgggcttcagatggggaccccagcgaagcaggggctgaagaaggtgtggctgggggctctggcctggtcctctggacacccccaaatatctaccctgtggactttgagctgagcatgcccactggcacccaggccacgtgggacctggaggagcctgcctggggcctgcctctgccagaaggagccagggctgctgaggaagagctgtggggcagaagtgaagccccgcaggggaggccacagggtccagcctgtctttaggatcatctacactgcatgaggggagccccaggaaggcagcattcataagcccctgcaccagtgaggaagagaaagaggaggagaattaagaagaggatgatcgggaggaggaagaggagaataaggaggagcaggaggaagagggggaggagaaggaggaagagggggaggaggaagaggggaaggaggaggaagaagtgtaagaagagaagagaggatgtgttgggggtgggtagttgtttttggtttgcgtcatcatcaggcccgggctctgctcactgctgttccgtgtcaagaactccacctctgctttgccggtgtagatctcggccagtggctgcttgttctcttggggatgtgtgtgtttttatctgagcagctcctttccagagtaccccagcgcagttccaggagacggtgggaaggaggcatggcagacgctcaccttgtgactgtgacctcgactgcaggaggaccaaccagacacgggaaggagcagggctgcctgaggctccccaggaagctttgtgctttggcgttccacccctgctgttactcgtgactcagtttcctcaacttggtggggtgttccctgctatgttttccagcatcctgtgactgtcctgtgcagtctatagggcagggccctgccccagcgggtgggctcaggagggggttccctgaagcgagtacacattgccagagcccaccatcctggcaagaggtggatcctggggccctatggaaggagggatgtggtggggggggccacactgagggaggggccggggacttgtgacctgtagtggctgtttgcagtttctctctgtgttagattcccttttcttcagcagtttcagttcatgtttctcttcagtaaattttgttcagtgttccagtggtgtcttgcctctgctgtgtgaaactggggtgggaggtggtctgctggggatggggccacagtggccaggctgacatcgaggtgtgtgtggggcagggtctatgagggcctgtggggtgccttgggctgcatggagcctggcaacaggatgctggtggtcatgagcagtgactggctgggtaccaaaggcactccaggtgtcctcaggaataagtgacttggacattgaaggc

SEQ ID NO: 139497 - DNA, 1381 bp, Homo sapiens
cattccttcgttccttccttcgtctgctggtcgatttgttcgctcgttcattcattcattcgcacgctcattccactcctccccacctccacccaagcgtccagcccgcgcgcgccgctcccccgcaggctgatcagacttgcctgcccagtccgcccccgcccaaaccccgcccccttcccgccacgcccccttcccgggccaatcggggacgagactggggccggggcggggcctcgctccctcagaacccccggcggcgctcacggctccggaaacgcgccgcggggctgttagctcggctgggcacgggcggctccgtggcgcttcctgccacgccaggcctgcctgggccgcgccagcgccgctccaccgagggccgcgcgtcggccgccgccgggcctgggtgagtgtgcgggccgcgggaggatgtgcggggggcgctggaggggccgcagggcggaggtgatcgtgggggcggcaggaggacgtgtggacctgagtgagcgtgcagggccgcgagaggatgtgcagggggtgcaggactgtgtgcggggctggagcgagtgtgcgggccgcagaagagtgcacggtggagggagggggcgtctctgggcagttggagagctgctcggccttgggcgggccagagcagggaacgggtcccggatgacgagtacgaagaggcccgaaggccttcccgaggcgggcggggggcggcgatcccgggtgggaatcgctaaagtgtagaggcctgctctgctctttgggggacgctaggagatgggaaccgctcaggggcggagagaaaggacccctgcccctagctcctaggagcccgatctggagggggcattgtaggggtgggggttaaaggacttttccctggtctaggggagggactgagccgcagtctgggagctgggagggtgggccaggtgggaacagttcccgctggggagtccctcctttccttttgagtgggtgggagtgggggggggcggttaagcctcagcttggtggggagaatgggggccggtaggtagcctagagagagagctgtggagaggcaggggaaagggggcggtgagccgagctcaaggccctctgtctgaaccagtctttttctgtcgccctactgggggccgccatctcccacttcagtgcccccgcccccttaaactcctttgctggctcctccagtctatatttgggtgattaattatatatcttttccacacacaccccccactcgcctgccgcccaaagtccatggtccctttcaaacaaccccctgcccccattcctggcccacttcccagaggtcccaccctgccaccttgttccaactgaagccctccagccagccttgacctagctg

SEQ ID NO: 139498 - DNA, 1031 bp, Homo sapiens
gagaaatgggaacacaaagctttcctcaattaagtacaacaaacactacaaaatccccttctggtctaccttctggctttttatagaaaggaaataagatagaaacccaaacagaaagagacaggtgcccaggcaaagtgagaggaaacagatgccttcccacccacacatacagaaaaaggcacacacagacacaaataccccaagagagacagactttcctggtgagacaccctctctttaggcccttcaggattctgctacttcgagtagcagcctgtttgctgctttgggacgggacgggatgggcccacgtggggccttcacttccgcctcctggcctgtcaggtggaaagaacatgaaggccaggctcagcgtggcccagggcttggctcaagggttgcatcctggcctggctagggtggatccagatcgtggcagtatatattcagttgaaccctgtatctggcccagttcagtacatcccccaaaatgtgggggacatgttcctgggaggtgcacacaggtctgcttctgttcacctgaattattgcaatccaacagatggggccttacctgccaggctgatcccttggagtagttctgaggcatgatgagtcatccgtgtgtgtctcttttgggtaagtctgggtgtttatgcatggtgtctgctggctttgacgctgggcatgctatcagaagaccctataggtggggttacaacatggtgaggagtatcgttttggttccggaagcacttatattttcatctgtgccactgttgctgaactgtctttgcccagagacagttctctcaatccaagcaatacaactcacaggagaaaagatattcaggaaagagaatctggagtctaatctcccttttggatgggagagggagctgaaggcatccatctgaattggatcttttgtgagtggaaacctttgaagacacccgttgctctggcctagaactgagcagaacacaagccacctgttgtcttctgggtaaactcaagctttagggcct

SEQ ID NO: 139499 - DNA, 2092 bp, Homo sapiens
tttaaaggcagcacccaaacacccatatataccattaggcctagatgacactaagcctcacccccagtctgtcttctggctgtggcgtggtgttataggttggatattatttcactcttctctggtgtggtttgaaaagtctcaaatcttgggagctagatattaagcaagtttacctcttggagccctggtttccttctctgtgaatggaggcggtaataaccgcaggatgtggtaagtgaattacaggaagggagatgcatgtctccaaacacgtgtagtgcatgctccagggatggaagtgtgctccatttaacatgcccctccccacacacattgattcagtcaccccgcaatttatcacgtacccactcagggccaggagctgctgcagacactggggactcaggagtgaccaagaatgagaaagtgcccctgcgctgttggagctccatatctcctgggcactgtcagttagaaacaagcaatttcattggatagtttttagttagcaaaagtgttccaagtagactatgacggggactagagagtgaaggcattctaaggaggtgacattagagttgaggcctgatgtgggccaggcgcagtggctcacacctgtagtctcagcattcggagattgaggtgggaagatggcttgagcccagaagttcgagacagtctaggcagcatagtgagactccatctctacaattttttttttaagttaaaatattagctgggcatggtggcacgcagctgtagtcccagctactcaggaggctgaggcgggaggttcacaagcttgggaggttgaggctgcagtgagctgtgatggcaccactacactccagcctgggtgacagagtgagaccctgtctcagaaaaataaaaatagagttggggcctgaattctcagaaggagccatccatgagaagcccatggtattctcagcagtttcagaggccttgaaggccacagtcttggcctatcgaggattgaatgaaggccagtgtgtctggatgtcactgcgatgtggcagggcaagataaggaattggggggctgggccagggcattgtcagaaggctaagttcttaggtctctggcctgaggtcagcgagaagaggtctctaacaggtcctctttctcagaaggtgtatccacaatatccccctctacattctgtttggcagccaaacgtcaatgtcaattggaagtgaatttttttaaatgaattgtgtaagtaattcatgaccagttcattttgtactggaagccaaagtcaaatcagacatcgaatgtataccagaggaatccaacggaccagcagggccctgcccgggtgacagtgggacagagagggtgtggctgctgagcacccgaggatgaacacgatctcacactggggaagcccctgtgccagacagccagttaaagatgggaatggggctgccttggactctggggctagatgaggccttctgcccgcacttcttaggtgctgatagcttgcagggaggagcccaggaagtcacaaccccaggggcctgtctctaggctttctggtcatttcccttcatggaccgcccatagattcctgccagcccttctcccctgcacttgccttgctgtgtagggatcccaggaaatgctgggttttttacccaagcagaagggctgctccccattgactccttggcctcagcccttggcttctcacatgctgagcagctttcttactcaaagtcttttaaaagcaaaatattttacaattgttatgcttttctgataccaagaaaattcagcttggttactaaaaattctcacattacagaaaaagaaagcagatctttctagaccttgactctccccaactccaaccccatgtggtcacatacacattagagatgtgcttattctagctacaagtcactctcacttttttccttttttctcctaaaatgcaaatatatacttagccatctcctcccctccccttcccttaccctctttaggttttcaagggagaagtaactatgtctgcctgtatcatctacgaaggattcacatttttgtcatctgcagcaca

SEQ ID NO: 139500 - DNA, 1114 bp, Homo sapiens
atgtaggtgttagaccactttctcttaccccaggtcattaagatgctgtttgtttttaaaaactctttttctctctgagcttcatttgagatcatttctattgctatgtcatcaagttctctaattttcttgtgtggtatctaatctgctgttaatcacatctagtaaaattttcactttaaatatcatagttcccacctccagaagttccatttggttctttttatatcttctatttctctcactatattcctgtttttcttttaatgcttgtacatcattaaactcgctgttatccttgtctgtgagtcatcactggtcatttctgtgtgtttttattaactgattattctccttgtcctggccacatttctgtgctttttggcgtttcagtaacttctgattggatgttgggtattataaagattatattattgagtgtctggatttggggtggtagttacttgtggatcagtatgatccctttgaggcctatttttaagctttctttgagacaggtcttttgtagctttggctctaggaatagatcagccctactactaaggcctctggattctctgctgcatgtcccaggtgatcacagaggactctctatactggttgatcagaccttgaatgtctccctacctttgtgtgtcctgagaattgttcagcttacagcttcctggtcacccttttcctgggcttttggagtttcactctatgcatgcatgggcctagtagtcaggaaagactcaaggggaggcttatacagattttttgaagctctttttactgcataactaactcctttctggaactctgctctgcaacttccagctgcctcagctgctctgaatgctggcctgtgtctcctcaacttggcgaagccactaagctctatttggttctcgcccaccccaacacacagtctcgatctggaaattgcctccaggcagagagctggggcaatgatagggctcccgtcatctgtttctcttctcttggggatcatgattctgtgcttcctgctgtccagtgtctgaaaacttgtttcacatatattttctccatttttttctacttatttatggcacgatgtgaaatctgttcc

SEQ ID NO: 139501 - DNA, 2119 bp, Homo sapiens
ttctagttagggtttggggccccagctgagctcttgatggtgaggttaggttgaggatcagcagggccctttggagattcaagttatgtttggggatcccagctgagctcttggggttgaggttagggttgggggacccagctgagcctttggggacgtgtgtggctgctctctggtcacagaaggggtgacctcctcagcaccactgtggtagagagtgtccagaatgaggtccctctgcccctggcttctgcagtccttgcttctggtggcttccgggcccaggccccgtgctcagtggctgtctcagaaagaaaaagattcttgacaaaggagaggcccttccctccttcatcctctgcagactacactgccttgtgtttatcgtttcagaaagcacctccgcgacccgacaccagatgaagggggaagatgcccagccacaggagatggcgtccacaagcttcccaagggccagtggtcccagtcctgaattcagacagcacggggactctgacgggaagagagggagcccacagaatctgcccatagaacatcattttgcttgtaaagagtgtggggacacctttcggcttaaagtcctgcttgtccagcaccagagagtccacagtgaggagaagggctgggaatgtggcgactgcgggaaggtctttaggggggtggcggagtttaatgagcacaggaaaagccacgtagctgcggagccccagcccggccccagtagggccctggagaatgccgcggagaagagggagcagatggagagggaggcaaagcccttcgagtgcgaggagtgcggaaaacggtttaagaagaatgcaggcctgagtcagcatctgagggtccacagcagagagaagccctttgattgcgaggaatgcgggcggtcgttcaaagtcaacacccacctcttccgacatcagaaacttcacacttcggaaaagcctttcgcctgcaaggcgtgcagcagggatttcctggatcgccaggagcttctcaagcaccagcgcatgcacactggccacctgcccttcgactgcgacgactgcggcaagtccttccgaggggtcaacgggctggccgagcaccagcgcatccacagtggggccaagccatacgggtgtccccactgcggcaagctcttccgaaggagctcggagctcaccaagcaccggcggatccacacgggcgagaagccctacgcctgcggccagtgcggcaaggccttccgccagagctccagcctcctggagcacgcacgcatccacagtggcgagcggccctacgcatgcggcgagtgtggcaaggccttccgtgggccctctgacctcatcaagcaccggcgcatccacagcggactgaaaccctatgagtgcgacaaatgcggcaaggccttccgccggagctccggcctcagtcgccaccggcggatccacagtggggcgcggcgctgcgaatgcagccagtgtggccgcgtgttcaagaggcgctcggcactgcagaagcatcagccaacccaccacgagtagaaacgccctgtggtcccgcgggacagggacggagtccccagaggggatggcagagtcaaaggagatgaacagttttgtagcgcttatatattttgtcttccaaaaggttgagaccgatttatactgccaccagcaatttataagtgttacgttatgcccatcaagagtagcttgtaccatttaacttagtttggctagtttaactggtaggaagtaccatcaaggtatttcagtccacatgccttgaatccaagaatgagagaggacaaatctggatgtggggtagggaggggcttagaggtcatcaactccaagctccccccgccccagagaaacacacagagctgttccacgatggcgtcctcataatgtgatcccagctttcctgaagagaacgttgccctcatgatttttggcctacttgaatttataaatttttagggatgtaaatagaacactcaaatgtcttaaaatatttaatttattaatttagttatacatacatactgtaaatcacatattatataaaataatatattaatttagaaaataccccatttttgccaccc

SEQ ID NO: 139502 - DNA, 2167 bp, Homo sapiens
ggccaaacgcctagtaacagttactgaatctgggttaaatgtcggtatctttttttcttaaaccatttcaatttggtgtcccctatacatatccaaaactagcatcgattggggttgttttgaactaatgggtcttgtcctcaagcagcactattttgttcaaaataaaatagttgagagcatgcccctaagaagagatacatctcaaggactcaagtgcagggtgacgcctccttttggaaatgagcctctcctggtatcaggcctagatggtacttctccagccttccgtttcttgttctataaaacaggggtgatcacagcacctacctccgaaggttatcacgaggactgccatcgtggctgcagagtgccaggaccaccggcctggtatggaggtacacactcagtgaaggccatctgctgtcattgtcattgtcatagttattgccgtcattctgtggcttgtcaattccagaactggggatagaccccaggcctcctgaccaccagtctcatctttctcttatgcgatgacttaaatggtgtttctgttttttgcatgcaaatggtccgttcatctcctttgactagttatcaacttaccttcggatatattaactttatgtagcagttctttctatattgatggtgatgttctcttttccaattttattgctttgctttttgtagcagttttattacgtttttgttgtgaaagcttttaatttttacatatccaagcattcattttttgtccactcagtcataactttcattgcttctgtagctagatatgatgacattttctctagaattttaattacaaacaaaaagctgcaaccccagcccatcagaaggtgagtacaccaggtgggcaggctggatggaaatgggccagagaagcaggctctttcctcatccgagatgcggactccctgtctatctgtgggcaccacttgactatccaacctgaccactgcggcacactggagatgctcccatcatagattagccagaactctgtgactgctcatcattatagaccccgccagcagcagtggggcttggcctcacctagatcaatggagtggtccaaacttggtctgggagcaagcagcccagccatcctttgagctcctgggagccttggcaatgctccgagtggattcagtgactgagcagcagattcacccaagaaacatctccttggacacaagaagacttgcctagaccacatcctcctttcagccggtgactctagaactagaaagagattggttcataggcttctgctgtgggcagctaggggaaaattcacccatgtgttctggcatcacttcctatagccacacctaagtgagggcaacagagcagaggctcggagaggaaccctgcccctccgatggcttgtgcgttatgctgatagaagctggcagcactgccctgggctatgatttgcaacagccatgcccaggaggagcactaaagcaaaggtttggagggcagtggaacccttctgaaagcctgtgtggcatagaagtagaagctggtcctcctgggtctgagctaccatttccagtgggctcccccaagaggaacagcagcaagggctagcgaggaacctgcccctccagtggcccacagaagccacagatagaagccagccccaccagggctgtgctgtgacttcccagcagctgtggctggggacagggacactaggagggcctggcaaggaagtgtgcccttctcgtgggcccaccaaggctgaggcagagcttcctagcagacacaacttggaagggcttctcaggcacccatcctgacccccaggctggagaggagccaaaagcacttgttacatagtgattccttttgccctgtgggcctcagttcttgcagtagttgtgaatctgtgtctgaaatcactactttcttctcggatcctttttctcttttcgagttgttaggatgtgttttgtacagctgtcatttgataaagaaggttgacctctaccaggggcaagtctggcacctttacctagaagtactctgccatgtcttgcccgttcatttatcgtttgttgggtttcatgagggatcccattgaagtagatcccttttatgaagggatcccattgaatgcagcattaactcagaacgt

SEQ ID NO: 139503 - DNA, 1010 bp, Homo sapiens
tttttctattgtagtctatgtatttttcttattttttgttccttctatcttctagttacgagaacttagttacatgtttgtttcccttctgttctccaaatctcccatcagaatctctcatgttgcccatctcaccaaaacctataagaaagggaattctggaaaacatagttcaggctagccaagttgacacattacaaagccacctcaatccatttcttgaactctcctcaaattactcagtctgcacgtgacagtcatttcctgtcagacagctgactgttacagaagtgtagcatgttttatcattcaataaaatatttattaattcccatgttactgtccttgagccctggatgatttcaatgtgcatttcttcttttctaaacacgtggggatttttctagttatatacagtgagcttcttcctctctgcagtgagggagatgtgcgccatctcagagaaagtacgttagaaaaaaacctattagatttggacttttgtggggtattttgaggagggcccgaggaagccagggtttgctctaagcactgtcagagagcgaggacaagtctatgattgggtatcttagtaaatcttttctctggggagggcaggctagaacaaagctaaagctgtaatttgtaaagaagcagcagtcacccacactagccaagcaggaggaggacgtttggtattttgtgggttgcacgttaaccttgtttttatctgcacttagacaaaataatgaagtggccttgctttgtctcattttctcatggtctccaagtaaccttgtctgaggttagtattctgggagattgtttatgtccaataggagaacagcatggcctccctgcaagggccaggccagcttccaaatgtcagggtctgctgtttattttccctttctcttgggtttctagcttaatgacactgtggtcagagatcacgctctgaatgattttaaccctttgaaacatggtaagatttgctttaagttccagtt

SEQ ID NO: 139504 - DNA, 1944 bp, Homo sapiens
aaagcgcccagcactgcatctgctacaaagcgcttctggcatttccttgaaccatgagatgcaaacagattgtaagtttaggaaagaggaaagttggtaaccaaagcagtggagctgagagggtttcctggcaggcgggctgtaatccctggcccgcatggccacggaagctgcctgcagcccttcctgggcagccgtgcacagactggcggccccagcctaagtcacaggactctgagttagagcatgtttctgttggccgagctgtcacccaggatagctgtccttgtcagcactggccatcctcccagttctcaatctcgaggcctcggggctctgcaatagaagccaccaaagcaggtggaaaagaggtcagctgaccttcaaggggccactgagggcggccttcaggccagagggtgagacagaggtggcctgtgagggcaccaggcacccaatggggatgtgcgctgggctatttgaatcttttgacaaaatctgtcacctagctcctctgggcatcagcagaaggtgagggtgacctccccaggtgatctcggcctcctttctggctggatactggtgacgtgaatacaatgcagctgggccccccagagacccatcacctgccattgtctgggaggtggacttaaaactgactttcaaggcctcagacaggcaccaaaggccttttctcctgggaagcaacagtggggttggaggagtcccaggggagacggttcagctattcaccttcatgaagacctcaccccacaggctggagggccccagttcctacttctctccttcagcccaagccagaggccttggggactcagacccacagaccgcataatggccccaagcccaagcttactgaaatagaggaggccctgctgcctctctctgatttcagggggccagagaagagaggtgtgagagctagggggtcaccaacagttgatcttgggctgagaaattaggaaaaagatcaaatcctaaatgacaagattttcttctagaactaccattcgcctttcttggtccacagtgagctcagatggactaggagcatcgcagggcttgtttatatagggaaatgctcctggcgtggatttgtggactgagctaaactcctgaagccagggcaggtggaaaggctcctgtcatgtgcacgtttgtctaccagtggcgccatgtgcctggctggctctggctggccagttacatatgttgaactaccaggggctctgtgtcttttaaggacatgattccagattccactggagtcaaacctatttcgtggtgcagagtcgctgggcaactagcaatctgcatgtggttttcatcgcaaatctcatctcccatgtcagatgagtagtctgctgttgccgtggtgaatcagtattatactgtgaccttgattctgggcagaaatgtacgttgccttgaccatgattacacaaaatacgttgtctaggaaacagcacagttccgagaacaggaagggctagataattcttggctttgcttggaagccacacagtgttaccttgtacccagcggggtctcagctttccttggaggcccctctgctgtctctgtgtgtgacacagacagagaggcaggacagagccagggacagacagaaagggggaaacatcagaaagtcacaggctagggtgagcctctgcagctgctgtgtgagagctgctggggagggggccaggcttctggcctcttgcccagtctctgtcacccaatgcagttccaggactggggaggtgtggcactgtgggagggcatcacccacctctgggaaatgttggttgcctggctccatctatgggaagctctgcaaatacatgcaccacaaaccccccaaattccccacacacaaacacacacaccatacaccccacacacaccacacatgaacacaca

SEQ ID NO: 139505 - DNA, 1116 bp, Homo sapiens
ccagtatgtctgtggtttagtttcctgaaattgtcattgctttgcatgggattttcatcctggtaatatttttattcttttcttccattcttttccctgagctctgcgaccttcattttatttccttctgttttcttgtcatctcttctctgagcactgcatctctcctttaagctgtgtcttttgttctgagagtcatgttttcaggactttctctgagtctatggagcattttttttttttgtctgggggctttctgcgttttctcgtaattcctccttgtggttttcatctgctcttagctctcccttccacctattgtttttgccgttgtcgctgttgccaacgtatgtgtacaacccgcattggtttgcaaaggcactggatttcaccagcatcttcccatcgtctccctcgtccgcatcatctgaccgggatgttctgccacaccagtggcctgtggccttcaatttcattaatctagtcagagatttgttttcaagtgttctattactttggggacagtgacccttagcttgggggcgatctgatttctgcctcagttctgaggaggcattgccggctcggctcggcttgttctctactccctgtccagacttagcaatgtgcggctgggcctctggctaatttgtggtctgagattgtagcagttttcaatggtatttttctctttgaagttgtatttgaagcaaggccagcccatcatttttctgtataactaaaaaagaaaagtgccaagaccatgaaggaatgttgtttctttagtctgtatcttttgcaagcagataacatcataggccatgcccatatataatatatagtgctcagctccatctgttcccagaccatgtcagtcactgggaggcaaacttccaggagctctggactggggagggggcatctgtagctcctgcttgaaggctactccaggccaggaagacccagcctatctcagctggcaagatgaggcttttcaggcaactctggactgtttcttaaactgtgacctgggacattggatcaaggaccttcaatccacttgggaaaacgttaaagaggatgtggcctggagtaactcctgaaaggccaaggcag

SEQ ID NO: 139506 - DNA, 1050 bp, Homo sapiens
tactcagttccacccataggctaaggtccgcaagcaggggtcccgggtccgaggcccctcacagaggtggagcagccctggaggggccggcagtggcaccggtcacccaggttgatgggcctttctggctcctcacctgaggcgccaaggtctggtggattctcacctgtgtgcccgatgctgtgcctcggggaagcctggcttcagagcccaggattatccttctgcttggcctctgctctgctggtccccaaaggtcacagggtcttgctggtccagctggaagaagctgctctctagttccgccaggtgccttccaggtgcttctgtcctcagatgcacggagtagtgcccacctgggtgttatttgagttctatgggcacagggtttgtcgtgtctttctttccaggagttgaaattgtagatgattttcgggaactagctctcaaggacaggcactgctctgggtgacggcttggtgtggccagcacctccgctgggtcttccgatgctgcacttgagtgcgggtctccgtctctgggcggcctcccgccgatggggtgttcactcagggggtcaccactcaacagtgctctgctcccttggggctcagacctgcctcagtaatcttggggtggagggactagagataactcctccccctttcaacttgtccaaaatgggtagtgaactttcagtactgttatggtaaggaaaaaaatgagcttatgctgcttttcaaaacaataattttatactagtctgaaagcactggcaaattatcagtaatacctccccacgcacctttagttttgcaggggtcccagtgactgacagtgtgttataatgaaatgaggtgtggcctgcggacattagaatgattttacctacaggaacatttcttttccctcctttttgattgaggtgagattcacacaacataaaaattaattttttgagacagagtctagctttgtcgcccaggctggagtgcagtggtgcaatcacggctcgctgcaacctcaaccttcccagttcaagccatcacc

SEQ ID NO: 139507 - DNA, 1019 bp, Homo sapiens
ccacaggcaacggctccaccacagcagaccaggggcagtggcagctacccagatcctcttcccagcccctgtggctcgaaaagcagccccatgcaggagagaaggaagccctggatgagcaggaaatctgacctgaaggactttccgacaccactgaatacactcagtgcgacatccagacatgcttggacagctgtgaaaacccagccacaaagagactagaaacgaagtgaggctgggatctctaagaagagagaaaacagagagaaaaaccagcacaaagatcagcatcacacaggccccagccaggcacagggtctccagggcaggggacaggggagatgaagggcagggctccggaggaggtgggcacacagtacaagccaggtgagtgcaggcgccgagcacagggtagatggaacccacctcctgccatctggagtacaggggccaagggctggggccaaagcttcaagagagacagcctgtggcctcagaggagcagccaggatgccttacaagcactgagggccctgcacacccggccttgggctctggaccctgccaagccctgcaccaagagtgagggcagagcaggaaggccgggatggaggtctagacgatttgataagggcagatgccacacgagggacacagtccggagcctaggaagacagtctagagcagtgcgcattgcggcaggaagcccctctgctgggatgccactggaagctgatggcgagtggagagggtcctggggcgcaattccaggcgggctgagcacattccccagctcggtgtcaccccgaggcacaccccaggattcctgagcttcagagtcaccctcgggatgggcagaggatgacagattcagggttcacagcacttaatgtcaatgctaatgacttcaacatgtaaaaggcaaagtctagctgacagtggggccacggatggggagcggacaggcagggcaggtgaggggctgtgtcctcctctgtctgctgggggagggggatgat

SEQ ID NO: 139508 - DNA, 1026 bp, Homo sapiens
gattctgcgcggtggggcttgtcctggcctctgtgcctggccccgatgtgcttctggggccttccctgtggggctgagggcctgctgggcgagtgctctggcctgtgacggtgtggccctgggggctgcctttgcagcctgatggagcacttcgaggacaccagggagaagaacgaggccttgctgggggagctcttctctagcccccacctgcagatgctcctgaatccagagtgcgacccgtggcccctggacatgcagcccctcctcaacaagcagagtgatgactggcagtggtacgtgctcctggaggcctcagtggcagcaccctggcctcctgtcccagccccaggctgcttggttctgttactgcagacacccctggcagcggtgagttgcaagtgttccctttctctccctgcagggccagtgcctctgccaagtccgaggaggaggagaagctggcggagcttgccaggcagctgcaggagagtgctgccaagttgcacgcgcttagaacggaggtgagggtgctagctcctgggagggggttgcttggaggcaaggccctgctttgtcacctccctcagcacgtgaggcttaggcgaggttgcctgtgcaccgggcctgacatgttctagaatactgtggtgctcagtccgcggggaggtgagaggtgggtcccgtggctgggggaagggatcagcctcaggtattgggtggtgcccacgcctgagcacattgccatgtgccttgccgcacgtggtcctcctggcagcccttggcctggcctctgtttgattgcggaggagaccggggcccacaggagagtgagtgagggggctgaggctgggagccagaaggtcttgctctggcctgagtcgctcggtacagctcccctgtgtccctgtttctgaaagctttcttcctcgccctgggtgtgcagtgtctgaggtgagggccggtggcagcctggctggtgggcagggcagcctcaagggactctgcctctggctttgcagtact

SEQ ID NO: 139509 - DNA, 1026 bp, Homo sapiens
cgctggcacttgctggcatccgtcttgttgattctagccaccctgctcggtgtggggtggcatctcattatggttttgatttgcatttccccatgaccagtgatacggagcgtctttttgtgagcttgttggccatttctgtatatgctttggaaaaatttccatattcatgtcctttgcccactttttaattgggtcacttgtccagtgaggttttttttttgttttgttttgttttttttcttaattagtagacttaataatttagggtagttttaggttcacagcaaaattgagcagaaagtacagagagtctccacaggccccctgccccacacatacacagcctctcccgccatggacacgacaccctgcacacgggggctcctttgtcacagtccatgaaccagcatggacacattgtcacccaaagtccatatccagtgagtcttctctcctgtggttgagagtccgtggttctccgtgtgccaagtagttctctcgacattttgcctattactttggctctgggaaaatgtattctccacacaatttatatttgtatacatatttgtgctttagcaggcacttgacctgcttaggtttaaggagcaagttcagccgcctcccgcctcttgcctgccgttccttccagcatcagctctgtttctgcagcctttgcatggctcttcgggtcccccctgtgtgtgcgccacccagtggtcagcctgggagactttgctgggctcaccaagatcagatccacttgtgcacaggtgggcctgagcccaggcattgtaaacagatttgtggggtcactttcttgagccgtttcctctccactgtcttttggatactttctagttccctggggctcccttttcctgtcctccagacataaaccacccacttccgtgatggtggtggcacggccagctccctgccagtctgcaggagaactcggaatcctggtgttcctccctgacccacctgctgacattcgcttctcagagcctgcgagcacct

SEQ ID NO: 139510 - DNA, 1019 bp, Homo sapiens
ggggagggtgccaggagcccggggccagccctcaaaacccacccgctgcgccatttcgagaaagagccctgagtgctggcagcttccctctctgcctctgctgcagccatcttttttttttttttttttttttttggtcttgagaagaattttcatttcagtatccagattcatttctgtatccagatttccgaggtaaacttcctggaatattctttccctaataattaatggaaatgaaatccacgtgacacagaagtaaccactttaaagtgagccgctccgtgccgttgagcacgtgcacaggaattcacttcttccagcgcgtatagagggcccagggggattctctggctgtctccggcctgaccagctctgctgtttccctgcagggtctggccctcactgcaggacaggttcagctcactgaaaggggtcccaacagaggtgaagatccaaggtaggtggaatcttggtccattctgagcttgtccacagcctccttatggagtggtggtgcatgttccattggaccaacgttttcttttaggtggtgcatgttgtgtggatgttgctagagccttcttgaaccccacccttccctaggcatggcaggtgggagaactcctctcgcagggacctagagcacatcagtccctgcagcgctggtggccagagacagagatttttgccgatgccagcagtggttccgtctccctgtgtcagtggtgtgtgacacgctctctacaggtggcatttctaggggcacctgctgctctccagcggagcttgccttataacctcctttctatcatttcttggtagaaaccgtgcttaacctggtaatgaatgttggataaaggtgagcaaaactgcagtccccaagttggtggctaacttttcatcttcatggtgatctctctagaagttggtggaatgtcaaaggtcaaatttttcatgggcctgtgtctgttctggccactccagggtagataagctggaccctggagtcctgatcc

SEQ ID NO: 139511 - DNA, 1048 bp, Homo sapiens
aagcccttgagggccaatggctaggattcctcctccacctcctccacgcagcctcatggacgcccccgccctaaagcaggcttctggcagactcagaggcgtgggggcctgcagacttgctgatgaggagacatttcatcgcctgattaagccaagtcctgtccgggatggggaggggggtagtggaagcagtgaagggagtggagtggagggggcaccctccttgccagcagcatccactcccttcctgcctggagccctctgcccacactccgccctctccgcctcccgctccagggtctggccgtccctggtgagggatgggaacgcagtgccaccacacacgcggaacaccagcccctggcatggagaagacaggtgggtgctggtgctgatgatcccctcgcctcttcccccaggtccatccgccatgtggcccctgtggcgcctcgtgtctctgctggccctgagccaggccctgccctttgagcagagaggcttctgggacttcaccctggacgatgggccattcatgatgaacgatgaggaagcttcgggcgctgacacctcgggcgtcctggacccggactctgtcacacccacctacagcgccatgtgtcctttcggctgccactgccacctgcgggtggttcagtgctccgacctgggtttgtccctgagtgatggggagcggggcatgcagggaggctcaggtgcagcctgagagccccttctgaaggggacacatgctggtcctgtgggacggtggcgagcatgatgtaagtgtaggaggggtccagccgtctggctgtgagctgtgcagtttgtgcccacttgtggtggcatccccgtgtgcccgtcagtgtccctgtgtgtgtgtccccggtcctccctaccagtggggctagtcggctggatggctccaagttcatgctggtgatggtggtggggcccctaggtctcgagttcatgctggtggtgggggtggggcccctaggtctcaagttcatgctggtgatgggggtggggcccctaggtctgaagtctg

SEQ ID NO: 139512 - DNA, 1050 bp, Homo sapiens
cgatggcctgaagctcaactacctgcgcatctcagaggccaagctgactggcatccccaaaggtaggaagcccactcttcctgcacgcctgcctgcctcacccccaacagcacagatggccagggtgggggctctggatgggcccgatctactcagggaaaggctcaacagtcccctcccgccacctggggcagagctagggcccctgccctcagcacctgcattctcccctgtgccctcttctcctggcagacctccctgagaccctgaatgaactccacctagaccacaacaaaatccaggccatcgaactggaggacctgcttcgctactccaagctgtacaggtgaggccagcagggcaccgcccaagggtgatgccagagtccctcagtgctgtgtggcccctcgcgcccagccccccatccttacctccagcctttgagtccgtgtcattctcccgctcacaggctgggcctaggccacaaccagatcaggatgatcgagaacgggagcctgagcttcctgcccaccctccgggagctccacttggacaacaacaagttggccagggtgccctcagggctcccagacctcaagctcctccaggtgagagctgggcatgcacagccaggttccctaaggctgggctgggggaggcgtgtgtgtccccgggcagtccctcagtcccctggccctccttcccgaccggctctgggcatctgcaagggagcggtcctgatgctcccagctggtgctgaggaggcagggagcaggggctccatggtggataccgagcaaggcagcctggtagctcttggacccgagggtctccaggtgggtcggacaccagaaagatgtggcagagtccagggagtcgagaaactgtgggcgtgggagtgcacagatctgtgccaagacagtgaccgcccagggcaggaagtaggctgacgagggggagcagggtcttgcctgggattctatcgggagcttccatccctggcctggcccgcaaccaggtgggtgatcttggtcttgcccagccctgctc

SEQ ID NO: 139513 - DNA, 1081 bp, Homo sapiens
cctggccatccagtttggcaactacaaaaagtagaggcagctgcagccaccgcggggcctcagtgggggtctctggggaacacagccagacatcctgatggggaggcagagccaggaagctaagccagggcccagctgcgtccaacccagccccccacctcgggtccctgaccccagctcgatgccccatcaccgcctctccctggctcccaagggtgcaggtgggcgcaaggcccggcccccatcacatgttcccttggcctcagagctgcccctgctctcccaccacagccacccagaggcaccccatgaagcttttttctcgttcactcccaaacccaagtgtccaaggctccagtcctaggagaacagtccctgggtcagcagccaggaggcggtccataagaatggggacagtgggctctgccagggctgccgcacctgtccagacacacatgttctgttcctcctcctcatgcatttccagcctttcaaccctccccgactctgcggctcccctcagcccccttgcaagttcatggcctgtccctcccagacccctgctccactggcccttcgaccagtcctcccttctgttctctctttccccgtccttcctctctctctctctctctctctctctctctttctgtgtgtgtgtgtgtgtgtgtgtgtgtgtgtgtgtgtgtgtgtgtcttgtgcttcctcagacctttctcgcttctgagcttggtggcctgttccctccatctctccgaacctggcttcgcctgtccctttcactccacaccctctggccttctgccttgagctgggactgctttctgtctgtccggcctgcacccagcccctgcccacaaaaccccagggacagcagtctccccagcctgccctgctcaggccttgcccccaaacctgtactgtcccggaggaggttgggaggtggaggcccagcatcccgcgcagatgacaccatcaaccgccagagtcccagacaccggttttcctagaagcccctcacccccactggcccactggtggctaggtctccccttatccttctggtccagcgcaaggaggg

SEQ ID NO: 139514 - DNA, 1045 bp, Homo sapiens
gagcaaatggagacccgagtcctcacacggacctagacaccccccaccaagcccactgccccatgcctccttggaaggcagtggccaagcatgtactctccaggggctgcgcagatacctagacaaacacagaccagggaggagggaaagggcctctgtcccagcagctcaccgtgctgtgggggatgcccagacctcgcctcgtgctgactccagtggtcctagcacacccagcatggggcaaaaaccagatccggccaccgcctggtccttattaggccccaccatatgcccagcgcactgcctgtgctcaggaaacagcagggaggagacgtgggtttttttttttttaattgatttcttcctatttaaaaacaatactcttaatatgctctctataggaaacgtataaaacacagagaagtcgaaaatgtagtaaagccatcctatcatgcaaatgtaaatccaacatctccatttgattcatttcacattgctgtcattataccatgggctcaattgtgtaatctgttttttacttcacataagcattttctttattaatataatcccttcctaaatgaatggtttttttcaaaatggttatagtttaattttttaagattataaaagcagtaagtgcttattgcaaaaagaaagaatgatcttgaaccatgcaaagaagaaatttgatcattcaacagttatttaccaagcacccgggatgtatcaggcggccttcagtaattacaatttttaatggctgaataatattctcccaagagattgtaattcgcttaattatttggctatttttggaaacccaggcagtcagatttattttgctcttatgcgtgagctctgctgaggagcctctgtcctgaggagagggcccaggcagaggtatcttctgccaaattgttctccaaaagggctttttcatcgcactgcatggtgtcgctcactgcaaccttgccagcattagatattttaatcaaacaaattgtcataagtatctaggtcaaaaatatgtactttactttat

SEQ ID NO: 139515 - DNA, 1050 bp, Homo sapiens
ccttccagtgccccctcagcggtagtgtggaggtggccaggaaagcacagggacctgggacccgctggagtccaggagcctcctggcctgttttgtcatctgtgtgtcaggaggaggatggctagggactccccatgacagcagccagagagccgcatgctcactcccacgtgcacacccccagcagtctgcagaaaggctcctgtctagagggagagccaggcgctggccagacggccccagagggctgctgccaccccaggagcagtcagtcagggccacataggaggcctgggacacacaaggccgacccgtcccatcccatcctccccttctgtgcttccggggcaccatgcaggcctggcggacaacaccaatgacctggagaagcgcaggcagatctacgggcagaacttcatccccccaaagcaacccaagaccttcctgcagctggtgtgggaggccctgcaggacgtgaccctcatcatcctggaggtggctgccatcgtctctctgggcctctcgttctatgcgccgccaggagaggagagtgaaggtaaggcccgggggcctgggctggaaggaggaagaggaatggggcttgagatgagggacggtcacaggatggtgatgtctcctccactgcttcccttctgtcctccgcacagcctgtgggaatgtgtcgggaggcgcagaagatgagggcgaggccgaagctggctggatcgagggggctgccatcctgctgtccgtcatctgtgtggtgctggtcacggccttcaatgactggagcaaggagaagcagttccgaggcctgcagagccgaattgagcaggagcagaagttcacggtcatccggaacgggcagctcctccaggtccccgtggctgcgctggtggtgggggacattgcccaggtcaagtacggtgagtgccctggtcttcacccaccctgtcaaggaagctcggctcctgcttctggggagggtgagccagaggagacccccagcacaggttctccccggtggcctgcgtgtcgtcacctgcctta

SEQ ID NO: 139516 - DNA, 1043 bp, Homo sapiens
aatgttctgggaatagacagtggagggatataaacctcggagttatgtactttcaaaaggttaaaatggttctgttgaagtttgttatgtgattttttatctcaatttaaaaaattgttttgaaaagaccaagttgatcagcaggcaatttaaacaccccctttctaaggcggggtgaagaaaatctggacactcaccaatggggaaaatgggactgttgagaaagggttcccatgggacgcatagcccacgcagaaactcatacacagatgctcctggcagcaccattcacaagagccaaaaagtgggaacgagccatgtgtccatcagggcagacatacataatgtggcagtctgtgccgtggagtgttatgaggccatgaaaaggcagaaagtcctgccctatgctacggtgtgtgtgagcctgaaaacacggtgctaagcgagatgccagacacaagaggccacatattatttgatcccataggaatgaaatgtccggaacaggcaaatccatagacccaggaagcctgtgagtggttgccgggggctgggatgtttgggggagaaatggggaaatgactgctcaagagcacagggtttctttttaagatgatgacaatcttctggaactagatagagccaatggttgcacaacgtggtgaatgtcctacaaattcgagtgctgaattatgtacttgaaaatggtgaatttttggcatatgaatttgatctcaattaaaataatctgcagcaaagaaaacaaaaccctcactctcacaatctggccctcaggcctgagcccaggtgtcctagctggggcatggcagcccccagtacccacctgagtaatgcaggcacctgtgaaggccacgatcacagccaccacattgaccgtcagttgaaactgcaggaacttggagatgctgtcatagacgttacggccccacatgactgccttgacgatgctggtgaagttgtcatcggtcaggatgatgtcggaggcctccttggccacgtcggtccctgcgatgccctggggg

SEQ ID NO: 139517 - DNA, 1047 bp, Homo sapiens
caaggaggcctccgacatcatcctgaccgatgacaacttcaccagcatcgtcaaggcagtcatgtggggccgtaacgtctatgacagcatctccaagttcctgcagtttcaactgacggtcaatgtggtggctgtgatcgtggccttcacaggtgcctgcattactcaggtgggtactgggggctgccatgccccagctaggacacctgggctcaggcctgagggccagattgtgagagtgagggttttgttttctttgctgcagattattttaattgagatcaaattcatatgccaaaaattcaccattttcaagtacataattcagcactcgaatttgtaggacattcaccacgttgtgcaaccattggctctatctagttccagaagattgtcatcatcttaaaaagaaaccctgtgctcttgagcagtcatttccccatttctcccccaaacatcccagcccccggcaaccactcacaggcttcctgggtctatggatttgcctgttccggacatttcattcctatgggatcaaataatatgtggcctcttgtgtctggcatctcgcttagcaccgtgttttcaggctcacacacaccgtagcatagggcaggactttctgccttttcatggcctcataacactccacggcacagactgccacattatgtatgtctgccctgatggacacatggctcgttcccactttttggctcttgtgaatggtgctgccaggagcatctgtgtatgagtttctgcgtgggctatgcgtcccatgggaaccctttctcaacagtcccattttccccattggtgagtgtccagattttcttcaccccgccttagaaagggggtgtttaaattgcctgctgatcaacttggtcttttcaaaacaattttttaaattgagataaaaaatcacataacaaacttcaacagaaccattttaaccttttgaaagtacataactccgaggtttatatccctccactgtctattcccagaacattctcatcaccccaaaaggacacccagaccccgtga

SEQ ID NO: 139518 - DNA, 1054 bp, Homo sapiens
ctccccttcctcaccggggctctctgtgttctggccaggccagggcataggtgacagtgttcagagtccagacctaacacatccttcccaggctacgctgtgttcggtgcctaggatgccagcctcgcctcccggttctcagctggagaggccccttggacccctggggggctcttgaaatgtggagttctttgttgccccttgacctagccctgcgtgatcgtggtctctgggggactctgtagctctggaaagttttgcaaggagcccgtggtgagagtgagaggagtcaaagagggctttgtaagcatgagggcccaggggacgcagcgggagttggggaggtgcagtggcacaggcgggcagagggcatgattggaaaggcagccgggggtgcaggggtgcaggtgtgcaggaaggttggggtgacaccaagaggcaggggcttgaaggccatggtcaggagcgtagacttcatccttaggacaatggagagaggctccaccagtcccactgcagagggtggtgttggaggggctgagctgagccaaggcaagcaaaggaggctgaggcccagggagtggggttgccctgaggctgggtcccttgagactcggcccttgagaccactgggagggaacacaggacccagggcaccaagaacagctttgtgcaagttgcatggatgattctttgggacaggcccttggtgatgtgtgactgaccctgggaaggggtgtggcctcaggccccgcctattcccgcttgagctggggctggtggctcaggcgggccctggctccgcagccaagtgtgcagtggtgtccttactctggcaggacctcagggaggagggtcagtcgctccatgtcaggggcattgcaactggggatcctggacagggcctggaggggcagggagtgatggctgtgacctgagagatggtggcccaggccttgcagaaggaggtggagtgtgaagcatgctgggtggccctctggaggctgctgggggaggggcaggccatgaaggagaggctgcaggggctgcggtg

SEQ ID NO: 139519 - DNA, 1005 bp, Homo sapiens
aaggagaaggccgagagggggcgctccaggtctggagcaggtataattggagcatttgcactgagacccctgccagagaggagaaaaccctttcaagggaaattttaatctaaaaggaaaaaaccaaaatattgatgagaaggagtcctccagttagtgaaaggggagtttcgttttcagctttctttggttcctactccaattccacatccttcatcctggccatgcccccaccttcaagagcatgaagcactcttggagttgtgggtcctgcccagagtccagagagcagcctcagctgagcacaggtccgagggggcgggggcagggccaagagttcaaaagaagccaatggagggagagggagcgtcagaagcccggaggagctggtggtgggagaatgacggcagggacgcagccacagttcagaccctgtcccctcagcacctggatggactcccactgtttgctttggcaaatgccgaggagtcctcggtagaccaccttgatgtctgctgtgacatcagaggtgccaccaccaaagcactcttcccaccctagtctttgtgtccagcggccaagcttaagccatgaagtcatggatttgtggctcagcaccaggtcctgaggggagcgtatcctggcagtgtgggcacctggtggccaagcctcagtttcccccaaatgagcaaaggggataaagaggggcccgacttttgccaccctcctgaggaagcccctaggtccacacagtgatgccatgggggacccttgccttccacacttgcaggtgtcacgttttgcagggaggtgtttgggccttgggctcagccactgggagacagttgggacctgagggacagaggatcggaatggaaaccaccaacgtgcactggcaccctcagaaggcttgtctcacctccaccggcatccacacaaaaccaaacaggagcaggcgtcatccccactattcccatgaatgccatgtcacccctgagcagaagc

SEQ ID NO: 139520 - DNA, 2469 bp, Homo sapiens
cccagacagaggcacttggctgcccagaaggccaggtcagcaggccccatgccctctccccaacaggaggcttcagcagattccaggccgagtgccctcacctgtgtgagaccagccttgctggccgtgccggctccagcatggcgccggtgcccggtccagtgcccgtggtggggttgggcagcctgtgcctgggctccgactgctctgatgcggaatccgaggctgaccgcgactccatgagctgtggcctggattcggagggtgccacacccccaccagtggggctgcgggcatccttccctgtccagatcctgcccaacctctatctgggcagtgcccgggattccgccaatttggagagcctggccaaactgggcatccgctacatcctcaatgtcacccccaacctcccaaacttcttcgagaagaatggtgactttcactacaagcagatccccatctccgaccactggagccagaacctgtcgcggttctttccggaggccattgagttcattggtgagtccaccccacccacccttccctcctgtcctccccaaggcctgctctggcctcccccttgtgagtactcctcccaagccccgctgccattcccagagccaaaagcctaggtgacagttctaggggacaggcagagctagggcggcccccagaggccactagagaaacctgcaggtcgtggccatctggcccagggggcagggcggggcctttgagggcccttcggaaggcctcggcctcacacacgcctgccctccgggtctcccgggccctttcctgccccatctagatgaggccttgtcccagaactgcggggtgctcgtccactgcttggcgggggtcagccgttctgtcaccgtcactgtggcctacctcatgcagaagctccacctctctctcaacgatgcctatgacctggtcaagaggaagaagtctaacatctcccccaacttcaacttcatggggcagttgctggactttgagcgcagcttgcggctggaggagcgccactcgcaggagcagggcagtggggggcaggcatctgcggcctccaacccgccctccttcttcaccacccccaccagtgatggcgccttcgagctggcccccacctagggccccgtggccggcaggccggcccctgccccacccccacccacgggtgtccctgcccactcgtgtggcaagggaggggagggcaggagggctcggcctgagcagggtgctggggggagagcgcaatacctcacgcgggctgccgtcctaatcaacgtgcctatggcgggaccacgctcggagcctgcctcttctgcgactgttactttttctttgcgggatgggggtgggggttccctctccaggtggttgtccaggcccatgtcccggccctgggtgctcagccagctcggctaggccctgcgcctccctgcgcttcccccttcaggaagggtgtgtgccacctcgttgcactggatcccagtggctgcttgggggagaggcgtttgccatcactggtgttgtcacctccctgtttctccaccaagggcttgggcctctcggggctggggcctcccaggggatggggacccagagtgcagtggccgcccacatccatggcctaggagctactgggcaggttcccggccacacatctggtgggctgttttgttttttttttttcctcttcccccagatgtcttgacgggatcactggggctctttgtgagtgagggtggccaaactaccgccggaggagatggggtctcagagcgagagctgcggagggggaggggaagaagaaggcctcacttttgctgctgcggggcccacacagccgctgctactttggggggtggggaaggggccaagctgcagacacacacagtcattcatttctgtccacacccctgtgggtggcgggtgtgcgtgtgtgtgcttgtgtgtgcgcacgtgtcggcgctcacacacacatgctagcccactgatgcacccagcccagggctggcagtctttgcagcgtggggccgtctcaccctggagcctggagaggatctatgcttgtttgtttttgtaatccatatcatagttgctttctttaattgttccttctgaataaacagtttatttaagatactgagtagagagagaagctacctcctgagcgccttggagggtttgggggaaggtggggaaggaggccctcttggtctctctggactgcccatggtggaaaggggcatgtgccaggctggccagggactcaagtgccaccccactccctgccccatgttatcatttcccatcttgtgcttacactgcccgctggcccacgctctgagtcgcccattcattcacctccatttgaacccctagtctgtgccacacactgtcctggggactaggttgcagcagtgagctccgcctgctcacagcagactttctagt

SEQ ID NO: 139521 - DNA, 1087 bp, Homo sapiens
tcacccctacgtggggccttgttgcctgtgggcacccctgctgtgggccccccttcccatcttctctgttgttcacactggactcccacgatacctacttgctgttgttttggtcagatgttgactgagcctctactctgggccaggtgctgggcactgacctgggcctatcagaagaggcgcctgccctccaggaggacgccctctattggaggggtggttttacggggatgataaaaatgatctttgtgggtctgggagcaatgagcaggagtgccagagccagccttacagaagaaaccggcactcgctcagaacagccagctcttccagtccaggcacgtggccagatcgcttcggcttggagcttaagccagctctgggctgccttgacacagggtgcaatatggcctcccgtcagcagggggagccacggccccatctttagacgtccattagcctccctagttccttcagcaccctgggcagcctctcaaatccattcctctccgcgactgcccctaccccacaccctgcaaatcctgccttggggaagtccaaccttgggggagaggtcctgcccatctgtgataggggcgagagggggaacccccaggtcaagcagaggcggcacccctccttcatccctccgagaccgcatatgaggaaggcagtttgggtcacctaggcagtgggatggcagcctgggagagagaaaggactggtttagccaaaggcaaaaggtggtgtgtgtgtgtgaagtgatggcaagggagctgtgctggacactgtgagggcttctcaggctcagggctggtgctgaggctggcagcaagaggaacgggccagaccaagcctggcaggggaaggagctggagctgtagtctaggagcagtggggagccatcgaaggggtttgtagccagagagcatccttgcccagtgtgggttaggtgctgagccggggccggctgctaggaattggggtgtctggaaccagaccagaattgagggtcaggggaaccctggtgggcatcacaaaaggaagctgtctctgctgttctgggccacacagggtgggtcacgtg

SEQ ID NO: 139522 - DNA, 2320 bp, Homo sapiens
gtcccggcctccagcttccagggtagccgggaagctgtagcccccagtgggcagcggtggagagagctcaaggaaggagggagcaccgggaggagacggctgcagcctgccaggagcggggagaaagggagagaaggggaggcggagggctgagggggcccgggggacgtcttcccagggctgggaggggccggccgggaagcctgggctgcactaggagccggcgaccctggggcgaggggcggcccggagccctgcgggaggagctggcggccgccccaggtagcaaccatcctgcctcccgctggagcggcgtctcctccccgggaggagggcagggaggaggtgggcggagtgtgacgaggagggcgggagggagggatgcgggagggggagggggaggggggccggccggccgtgggggtggggcgatagtgacatcaccccggagtcggtttttaagcggcggccggccggggacggggaagagagggatagtcggagcgaggtggcgagtcgctgagcccgccgcggccccgagagcggctgcagccgccgccgccgggaaggagagggcgaggcgcgcccgagccgccgccgccgccgccaccgccgccgccgccaccaccgccaccggagtcgcgggccagccgggcagcctccgcgggccccggccggggcggggggcgcgggccacaggcccctgctccggccgccgcttgcagaccgcgggcgccgatgtcgcccgcgccccgctaggctgagcctcgggtcgggcgaggagccgccgcagccgccgccgcccgagccgcgggcaggagcctcgggagccgccgccgccgccgccgccgcccggccgggccccgccgccgcccgcgcgcccccgggcccccgacacacatgagattcttcaggctcactttcaagtgcttcgtggactgcttctgactgcgccgcccgcgccccgcaccccgccgcccgcccgccgccccgtcccccggcccggccgccccccggcccccggccggcccgcgccctcggggccctccccggtgccgccggtgccccccgcctgaccgccgccccccgtgaggcgccgcgaccccggcccggccgtgcggcccgccgaggccatggcgaagaagagcgccgagaacggcatctatagcgtgtccggcgacgagaagaagggccccctcatcgcgcccgggcccgacggggccccggccaagggcgacggccccgtgggcctggggacacccggcggccgcctggccgtgccgccgcgcgagacctggacgcgccagatggacttcatcatgtcgtgcgtgggcttcgccgtgggcttgggcaacgtgtggcgcttcccctacctgtgctacaagaacggcggaggtgagttcccccgcccgccgcggcctcctcccccagcaggccgccggcccccgcccgacccccggagccgccgcggaggggtgaagtccgggcaacgggtggcccccgggcacgcgggggtcggggccgcccctcgtccgccgctgccgctcggtggccgggccgggcgcctccacccccctcgcagtcatgtgcctggcatggtggggggagggggccggcgatgcccgcgaggctgccccccagactcccgggctgggaggagcgattggccgccgaggtgggaaagcaggcctgcgccttggggtctccgcgaggtaaggagccctggctgcccccacgggtcgggcacacaagcggcacattgtgtgggccccccacgtgtgcacacacacgaacacacacacacacaatgggccactctgtccctccccctgccctcccctcccctcgcggccctcccgcccctcccctctggcccgggcctggaacactgggtgcccgagccaggcttgggaagcctgcggcctggcccgcctggcgccgccactggacacactgcatgcacgtcccatgcccgcccgcccgcccgcccgcccgggcccagcttagcaacagcgatgggcacgcgtgtgtcctgtgactacaaaacagcactggggttgctggaagccgaagtgacccggtgatgggtgggaaacagaggtccagagcaaaggcctttgcccaaggtcaggagaaggatgctgggacctggagtcaggcaagttgcagccaagctcagcctctgagtagtggagcgagcccagccagggcaagggtaggaggcccagagaggagaagggggtagtggcacccagctctccctgcccttctgccacccccaccccagcctgctggcctcaggagataggcctgtgtcacg

SEQ ID NO: 139523 - DNA, 3791 bp, Homo sapiens
gctaaggccggcctggcccctcttccgcacctgtatccctctgtccttgcacatcgccatcccaccagcaggggactgtgacccacccaccctctgccttagacctcacacttgcaggcaagcgtccaagggcaggacagtcgcgctccctgcctttggatgagccccccaggcctgatcacccagccttggcacacatgcacacatgcacgtgccctcactgtgctgcctgaaacagggaattgcagcactagggacagcccgcgtgtctgagcgtgtgtgtcctccatggccatcgccccaagtgaccgtgggggtggaagccctgggggcctagggcccctctgccacccagggaatagggctccaatggctcaggggctactgtagcccctcttcaacacactcaacccaccccctcaagactccacctggggcctgagtcagtggccacccctacactgactcacccagtcggaagttgtgatggggcctttggagtctgggctggcccgctgggcctgggcagcctggctgggggccaccctgagtccacgctgtgcctccacccccaggtgtgttccttattccctacgtcctgatcgccctggttggaggaatccccattttcttcttagagatctcgctgggccagttcatgaaggccggcagcatcaatgtctggaacatctgtcccctgttcaaaggtgagcagcccttggccagcctcagggactgcccccttctcccagctggctcccacttgagaaatcttttcctgtcgtgagcaccaggcctggggccacgtgatggcgtcccagtctcgaggggggagcctggaggagatgttcaggccgcacagcgaacttggggaagcggggactagagggggcataggcagctccacaaggcaaggacaggccaggcatagccgggctggggacgggacctgcccagcagcacccttggctctctaggtaggtcctactgttactatccccaaggacgctggggcacagacaggtggagcgacgtactgaggttgcccactgcaggggcgactgtctccaacactacctcaggcgactagaaaccccccccccccaccaccaccatcaacaccagctgctgaggactggaggctactgggtggccaggcagaggcttggacctcctggaaccgccatggtggcagtgggacccacagaaggggccaggtgtatgaggctggagactccacagcacttggtcagatggggacaggaggagaggggctcgctctgccttgggtctagggggcggctggaggagaggagacaggctggggagtcagcgcagtgttggggctcacacaagggggagcccaggggagtcaggagcaccacaaacaaggctccaggaggacagatggtgggagcacggccagcctgggtggggacataaaggggtggcagggggaggtggccagggaagaatctacatggcaaggacttcccggccccaggcctgggctacgcctccatggtgatcgtcttctactgcaacacctactacatcatggtgctggcctggggcttctattacctggtcaagtcctttaccaccacgctgccctgggccacatgtggccacacctggaacactcccgactgcgtggagatcttccgccatgaagactgtgccaatgccagcctggccaacctcacctgtgaccagcttgctgaccgccggtcccctgtcatcgagttctgggagtgagtccggcacctctgggccaagcccatcccatcccccaggtctccctcatgttgcccggctccaggggagtggccctgagggggcaccagggtgttgcctggcagtccatcctggaccctgcctgcccttgcctgtcctcggagagtcctggggccagcctcgctcctgggttcggcagccgatcactgtcctggtcactcccccctgatgggggagctggggctgcatgtgaggtgggatgggagtggcctcccaatggccaggggatcgtgggctccaggcccagcccaattggacaagagggacccgctgaaccctgggctgtgggagagaagggagccacaactcctgggggtggaccctgtggctccatcctctgctggcacaggcctcatgggacctccctccctcccctaggaacaaagtcttgaggctgtctgggggactggaggtgccaggggccctcaactgggaggtgaccctttgtctgctggcctgctgggtgctggtctacttctgtgtctggaagggggtcaaatccacgggaaaggtaccactagaggcatgcagcggggagggtggctcagccctgggagccggatgtctgtgccaggcacacctgtggcaacgggaggtgaccagacagagtctagccctaaggaagggggaggtactgaaagccaagcaatgctccccaccctgcaaatccagggcccagcagcctttgctcctggggatagaggccctggcaggcactgtcccttccctgtgcccatcacccccactggtgccctcctgccagtctctgactcttgtgacagtctggtggacctggtctggccatctgttacctatcttgccttggggacccagagcagagtctggccacatcccttgggggctcctggtcaggctggggagtcacctgaacaaagaagacagtgtctagagctgtgggacatggccagctccctgggggacaaggtccccagagcagcatgtgggaagagggggcagacagtgtggcagctgcatctcgcctgcctctgcctggcccagttccactctccacctgctcaacccccacctctctccagaagaggagggggacccgacccggatccaatatcccgctccctgcctgggcctcccacacctgcactgcccacacactcatacagctctcactccccacgtgctccacgcctcctgtccccactgaggagagctcccagaggctcgcctgctccccaccgacacgcgtccctgcagacaaacgaggcgcccagggagcttccccactgcacttggccagggctgccggggcgcagccttgcccctagcttcctctggcgggagccatggctcggaggacaatggggacctctgaacatacctgcccgcaagggggaccggaggcgctgggagtgggggtgtgagggaggtggtgccacagcctccgctgagcagcctggccccccagatcgtgtacttcactgctacattcccctacgtggtcctggtcgtgctgctggtgcgtggagtgctgctgcctggcgccctggatggcatcatttactatctcaagcctgactggtcaaagctggggtcccctcaggtgaggtggaggtggagaggctgcagcagggcgctgcgggggagccctgcaggcccctcatgcctgcgctctccggcccttctctaggtgtggatagatgcggggacccagattttcttttcttacgccattggcctgggggccctcacagccctgggcagctacaaccgcttcaacaacaactgctacaagtaagcaccgccgccctgccacccgtgccctgtcctgccctgccccgccctgcccagcagcctaacccatccactctggcccctccacccctcagggacgccatcatcctggctctcatcaacagtgggaccagcttctttgctggcttcgtggtcttctccatcctgggcttcatggctgcagagcagggcgtgcacatctccaaggtggcagagtcaggtag

SEQ ID NO: 139524 - DNA, 3953 bp, Homo sapiens
ttcaaacggaacttgtcagattgtgggcctgtgggggcaggtcctgggatttgtcaatgttgacagagaaaggacctcccagcccctgccgcacgacccagggttgacagcgcctctgaggcaggcgtgggcatgggcgcgagtgttgcaggcagggctcagggtgcgcacagggcaggacatcggctacaaggtctagagcctgcacctttcccacagggccgggcctggccttcatcgcctacccgcgggctgtcacgctgatgccagtggccccactctgggctgccctgttcttcttcatgctgttgctgcttggtctcgacagccaggtttgcatggggctctgggacagggagccaggaggggggcggagggagggctgcaggcaaggaaaggggtggagggcggtgcggggctcggcctgagctgccctggccacagtttgtaggtgtggagggcttcatcaccggcctcctcgacctcctcccggcctcctactacttccgtttccaaagggagatctctgtggccctctgttgtgccctctgctttgtcatcgatctctccatggtgactgatgtgagtggggtggggggtctgcctgtgacctctggtggccgtctgccatcctccctgactgggctctgtcccccagggcgggatgtacgtcttccagctgtttgactactactcggccagcggcaccaccctgctctggcaggccttttgggagtgcgtggtggtggcctgggtgtacggtaggtcatggctgagggctgggctgggggatggtggcggggaaggcaggtctccagcttggccctcccgcctcacctcgccgcaggagctgaccgcttcatggacgacattgcctgtatgatcgggtaccgaccttgcccctggatgaaatggtgctggtccttcttcaccccgctggtctgcatggtaagggctgggggaggtggggcagggcggggggcgaggcagggcggggtaggggccccattaaccgcagcattctggtccgtagggcatcttcatcttcaacgttgtgtactacgagccgctggtctacaacaacacctacgtgtacccgtggtggggtgaggccatgggctgggccttcgccctgtcctccatgctgtgcgtgccgctgcacctcctgggctgcctcctcagggccaagggcaccatggctgaggtaaggctcccgcccggcccgccctcccctcccctgctgtgaacattcaacccagcctgcttcctagccagggagtggccccgactagggtggcaggcagtgggaaccggagagaggcagaggaagtcaccgtggggacgagcaggtgaccctgggggcttcagcatgtcctcctctcctgcagcgctggcagcacctgacccagcccatctggggcctccaccacttggagtaccgagctcaggacgcagatgtcaggggcctgaccaccctgaccccagtgtccgagagcagcaaggtcgtcgtggtggagagtgtcatgtgacaactcagctcacatcaccagctcacctctggtagccatagcagcccctgcttcagccccaccgcacccctccagggggcctgcctttccctgacacttttggggtctgcctgggggaggaggggagaaagcaccatgagtgctcactaaaacaactttttccatttttaataaaacgccaaaaatatcacaacccaccaaaaatagatgcctctccccctccagccctagccgagctggtcctaggccccgcctagtgccccacccccacccacagtgctgcactcctcctgcccctgccacgcccaccccctgcccacctctccaggctctgctctgcagcacacccgtgggtgacccctcaccccagaagcagcagtggcagcttgggaaatgtgaggaagggaaggagggagagacgggagggaggagagagaggagaagggaggcaggggaggggcagcagaaccaaggcaaatatttcagctgggctatacccctctccccatccctgttatagaagcttagagagccagccagcaatggaaccttctggttcctgcgccaatcgccaccagtatcaattgtgtgagcttgggtgcgagtgcacgcgtgcgtgagtacggagagtatatatagatctctatctcttagcaaaggtgaatgccagatgtaaatggcgcctctgggcaaaggaggcttgtattttgcacattttataaaaacttgagagaatgagatttctgcttgtatatttctaaaaagaggaaggagcccaaaccatcctctccttaccactcccatccctgtgagccctaccttacccctctgcccctagccaaggagtgtgaatttatagatctaactttcataggcaaaacaaaagcttcgagctgttgcgtgtgtgagtctgttgtgtggatgtgcgtgtgtggtccccagccccagactggattggaaaagtgcatggtgggggcctcggggctgtccccacgctgtccctttgccacaagtctgtggggcaagaggctgcaatattccgtcctgggtgtctgggctgctaacctggcctgctcaggcttcccaccctgtgcggggcacacccccaggaagggaccctggacacggctcccacgtccaggcttaaggtggatgcacttcccgcacctccagtcttctgtgtagcagctttaacccacgtttgtctgtcacgtccagtcccgagacggctgagtgaccccaagaaaggcttccccgacacccagacagaggctgcagggctggggctgggtgagggtggcgggcctgcggggacattctactgtgctaaaaagccactgcagacatagcaataaaaacatgtcattttccaaagcaggctcctgcttccgcctctgctgctctaaggaaggggtcggggtacaggaggcagggggaacctcctccagctggagctgctgccgtgagcaaggctctgctctggaggcctctgcggccggcacccttctggggactgggaagggggcagggaaggcagcagcccaggggaaggccttgtccccctggagccgaggcagttggggagagcaggacgagagtgagctggagagcagccacacccgcggggaagggtgggcgtaaagccatgggtgctgaaattttcaaaatgttaccccaagaatttgtcactgaacaggtgccttgtgtcacttgggccaggctggtagcagcagaggggataactctgcatcagggatcaattttgaaggtggagccaataggggttgtgcatgaccaggatgcagggctcaaagaggagttaaggacaacagatttggcctgagcaagaggaaagatggagctgccaggtcctgcaatggggaggcaaggagagaatggtctggagtcagccttgggtgtgtcatgcaggaagtgtcatccaagtggagatgtctagttggcaggtggacacaggagttccagaaagtactggagatggaactgtgcaagttcttaccacatagagatgacactgaaagccctgagcctgagtgagctcacagggacgccgcaagccccggaacacaatgagaggggcagagcgaagacgtggcagtgataggggaggacgcctgagagttcctggtggggtcctgcaacctgagccagtgaggacccctcacaggtcagggaggagcagtggctggctccatctgtccagtgctgctgctggtgaaggacagtgacctgcaaatgctcactgagtctggcaagggtcacgggggcctggcgagggtggcttgcatgagcgggtgcgtgtgaaaggctgggtggtgtgcgactgagaaaaggagtggcggcagcgcagtgtcatctgcagacgaagggagagacaacaacgtagttcacccagacaaggaaata

SEQ ID NO: 139525 - DNA, 1324 bp, Homo sapiens
agtgagggccacataaatactcctaactttggacagctggcctcagtgcttggtggcccaagtttgggcaccacagcaggtggggaggaagggtccagcctcaaagggggcacccatgccctctgtatggggcaggcttggcagatgggcttcgagggcacctgtcaaaggtgtgcagagttgggaagggtctgatcaggtcttgaaggggactggatgccttgctgttccctgcagccaggactcagcccccagtgaggtcctggcagtcctccctggctggcgttaggtccagggctttccctagagcgtgggccagggctgacgctcccaccctggcaggcctttgggtgcagctggggagggggccccttgttcacttgaatagctgttgttaggagagaggggaaccgaggtggacctctggggcatggggctggaggtggcaggggaggagtggacccggccaacctactgctgtgggatttctgtccctttccaggctgcagtagatggtcccatggacaagaaggaagagtaagggcctccttcctcccctgcctgcagctggcttccacctggcacgtgcctgctgcttcctgagagcccggcctctccctccagtacttctgtttgtgcccttctgcttcccccattcccttccacagctcatagctcgtcatctcggcccttgtccacactctccaagcacattacaggggacctgattgctacacgttcagaatgcgtttgctgtcatcctgcttggcctggccaggcctggcacagccttggcttccacgcctgagcgtggagagcacgagttagttgtagtccggcttgcggtggggctgacttcctgttggtttgagcccctttttgttttgccctctgggtgttttctttggtcccgcaggagggtgggtggagcaggtggactggagtttctcttgagggcaataaaagttgtcatggtgtgtacgtggtgcggtgtgtgactgcagctgtggggagggctctgctttctctcctgcctggagcccccaagcggccacagcccttcaacctgtttcccccactgaaggccaggctcacacctgttctcgaaggccttgccctctctgtcctcctgctccccgggctgggccaggcctcgcttcagggccacccgccgagtgtgtgtcctgtctgcctccctgggtgtgggcagcttgggaggctcagtaaaccggcggggcttccgggtagaggactcgcttgccttctctgggttcctgttcgtcacatttgggacagacagaacgtggcagaacgccactagtca

SEQ ID NO: 139526 - DNA, 1096 bp, Homo sapiens
gtagttggccagtcttagacgtcccgtcaggaggtgagctgcaaggcaagctcggagggatgtggatgcagaggtgggatagagctggccaggccgactgggggctcctaactgcagtgagcggcaccatgtagggagcacgaggcaccgccatctgtggaggggttggtgagcaccatggagctgctgagccctgctgcttgggaaggaggcagggccaggggccaggggccaggggccagggcaggcaaggcgtgcccggcgagctgcagcaggtggccccgctggcgcttctctttccctcggcgggcagccacgccctggcctttgcctaggagctgggagcaagtggtggctcggttccgcgttgacatttccgaaggggcgtgtggccagggcagcttgaggaaccgcagctcggtggggaggatggggctggaacctctccctccctccctcctgagtaaccctggcctttggcacttttcccagggagctgctgttgacggaggcaagttggatgtcgggaatgctgaggtgaagttggaggaagagaacaggagcctgaaggctgacctgcagaagctaaaggacgagctggccagcactaagcaaagtgaggctcgacctcgtgtccttccccgcagggaagtccagaggagcctcctctgcccgctgctgcccattttgtgccaaagtattagtaacaagccttgcacgcacgctcgagggctggctgaaaacagaccaatagcaccctgcgcctccaaccccaatgcagccatgcttagccggcaggccagtgaggctaagtggtttgaatggggctcaggaggaaccaggctgcagttggtgggcctcgattgccctgcactagagcagtgcatgctggggctttcccgtccagagtgtggcacggtagccccagcatgcctgggggctgagaatgaggggagtgtgggagtggcgttcaggaggggagtgggcggctcccaagcggcctgcctgtctttggtctcccacgcatagacttaagtctggggcgttttcccccaataccacaggcctcgcctgctgctgctgtgtgcaaggcgtg

SEQ ID NO: 139527 - DNA, 3009 bp, Homo sapiens
accggctttctgccggctgggggctgaggagtgagcttatgtgaacaccatgtgtatgcaggggctgggggttgaatgacttgactcgcctgaaacccgtcagcagggcgggccgggggtggccacagcatggaatcttttggtcgggacttgctccttctccatttcctattaagcccgtgtcctcttccccttgctcatgggggaagacagggctgctgaaaagtgcttatgagccatggctctctccatttgatatggttggccctgtttctctagtctgtggagaggttctgtttctcctgccttctctggtttactcaaccttttataaaagcacgatagccctgctcagtgtccaacaacattctatcaagaaagcccagtcagattgaggcattggggctgccatgtgtcttccaaggccacatctggattctgttaagtttcgttcactggcctttttttggaccccaggccattctattggtgaccaccctgtatctgtaggagttgcctttggctcttaggttctttcctgttttctggaaatgaatagctaagaacagtgattcgggtaagactacttgggagatccagcagaggcagaagctaaaggccatgttcgtgccctgtcctgggggcctgggaagctacaagggaacagacaagcgcacgttaacgtgcctgagtgacccagtgtgagggagcgggaaaatgttctagaaggctggctcccaggctgaaaaatgccagtgatcagagaggacctggtctgcattgcttgggccctgggtgggggttgagggtgtgaggatgcagaggctggagctctgggttgtgccttcaggtcgcggcagtgaatgttttttccccctgcagccatgagcctggcttgcccatcagaacgggtctgagacggcgccttcccactcctgtcttctgtctcctctgttgctagactgagcagctctgtgtctgcctctgcccctcttggtgccaggctcccaggtgaacacaggtgcagtctaggcccagggagattctgtccagccttacgtgcagcctcaaatctgtcccctcacctgtcagggagcatttcctctcctgggagtgggatccagtcatctggaagcccagccccgcgccctccccccctttttttttttagctatacttgctggagtgggcggaagaccccttttcagtgtgccaggtatgggagtgcagagatgaaggcacagtgcccagcctaaagaccttcatagcctggtagggcagccatataaacggatggcagccacgcagagaacagagaatgaggtagttacatgcgggtgcctggggggctgctgcaggagcccccagaaggcgtccctctgatggggtgggagatccaaaagggtttctggggggaggtgaggattgagctgggtcgagaggacattccggcctggagaactgccacacagagccaggcgtgttccaggaatggtgaggggttaggtgttactagagcagggggccacgtggttagtgaaggaggagagctcactgagggcatgcgtgctggcagcaggtggcttaagcagagggctgacatggtcggatttgccttgctctgggaggtggatgggaaagccgtatggcagcagatagggaggaggcgccagcagtggggatgatggtgggcatgtttgcagttgacatggaaagtgctgggttgtggcttgggctgggggccaagagggctgagtccaaggcggtttgcctgcccaccactacagcaggggctacacgaggtggtcaggtcaggcaggacaagggaaggcccgttttggacaagctgagtctagaatgtctctggggacatccaggagccaatgtttagcaggaggttaggtatgagtctgggccacagagaaaaccctttcggggataagagtggctgggaggaaggtatagggtgtcagctgaagagtgcagaccccagagggagcagaataacagtgggaggagggtgttgcgaggggacctcaggagggtaacttagcagcagagcaaggagttcagggtgacctccggcctgggcggttaggaggccactggtggccctgctgctggcttggaagggcaggccttggccagcctaggttgaggaatatatgggagggaaaagaccaggggcttgggcagggtgactccaggaaggaggcagttgaaggtgaggttcctggggggagaatgatcccgggtcatccagcaggaagagagaggacctagaaggtgtgaaaaagaactatcgggctgggggtgcagtgggaggagtatgcccggggtgctgtgggggtggggagcgcctgtgagggttggcaagaggaaggggaaccggggcctggcagaggggagccccagactgtctcaaggctgggaactgaaggcctgggctggggctgagcagggccaggctttcggacacacacagcgtggatcttgcgctggactttgtgtatgccctggcctatcttggaagccctggttctcaatagccgggaagggcctgggacggtccgaaaagagctgggcctctgctgcactgccgcggaagcatttgtgttagctatctccctgggtactggggtgacagccatgggcactcaccagcagccgcttgcctggcctggtggcggggagtatagccttcagtcttgcttggtcctctctctaccaccaggtggcatgacccccacccctcaattccagctgggaggagcggtcctcttcctctttctacatcactgggatccgctctggggctgggcagctccttgccgggggcctgggtcttagtcagacttgcctttctttctaggcctctccattgacttctggccatgccgatgtgagtcagatgcattgtttctctctggctcctagggcgctcagtagcttcctccaccttcaggctgtagcccagtgcggggcaggctggtgggcagctgggggctg

SEQ ID NO: 139528 - DNA, 2460 bp, Homo sapiens
ttttttttttttttgagatggagtttcgctcttgtcccccggtctggagtgcagtggctcaatttcggctcactgcaacctccgcctcccgggttcaaatgattcttttgcctcagcctcccgagtagctgggattacaggcgcccaccaccacgccgggctaaattttttttttttgtatttttagtagagatggggttttgccatgttggccaggcttgtctcgaactcctgacctcaggtgatctgcccgcctctgcctcccaaagtgctgagattataggcgtgagccactgcacctggcctgagggtgggagcttctgataacagcatcccatgaggggtgtatgtgcatagaagtgggaagaactggggaggcggatttgagggaagtgagtctgacctgtctcatgccgcctgtctgcctggtatggccttatcttgccctagtgtccgctaaatgcccgtgtctcctctctgctccaccacagatgccgtgcgcgaaattcggaagtatgatgatgtgacggaaaaggtgaacctccagaacaatcccggggccatggagcacttccacatgaagcttttccgtgcccagaggaatctctacattgctggcttttccttgctgctgtccttgtgagtggggggttgagggggcaggtgctgtgaaaggagccatgggctagccatggacaccgagctcagtgggctcagtctcccccctgtgactttgattcctcctcagtctgtggcctggatcccaaagccctgtctgtgttagggaagccacatagttttctcctgacctccagaggcagcgtggagagtaggagagggctgcctgaaatatcagaagaccctcacacaccacatactctcaggcaaacagatgactatctcacggtctgtttgcatggagagtgagatgtaacggtaaggccttgccctcctctgggagaggaccttcagagtccagctcacaagggagcgactgaatgggggactctttgtgtccggggtgttgacctagggacagcaggtaaaagtggcacgaagaggctgggcctctcctcacctcagggccttccccacgtgaaactcgtaatgaggacatgttacattccatggcagccagagtatttctgatgatttttttggtaaaactaagtaccttaatcaaggctaagggtaactagtcgggcaaaactagaccactacgaagtgcctatttgagcctggggccctgtttgctgcctcctgcttcacatagccgttctgatcagcagggcctggctgggaggtggatgggagctcagaccatgtatgaaggcattggaaaggcgcttgctttgagggtggagctctcatcacttaatcacttctcaaaagaccccacctcttaatgctacggcagtgaggattaaattccaacacatgaagtttgaagggcactcagaccatagcaccaagtgattctcaggctcatggacagttattccccacttggttttgtgccccgagactcaagaatctccatgcctaggagattcttgctctctagtcacctggtgtgtcctgctttactaggcgctacgatgactacttgtcttaaaatctgttgtttagatgatctggtactctctgcgaccaagttggaaagaggggtggagctagaaaaggcaaacacatttttttcaagataatgggtttgatcacagatttgatctacaagcttgctgtcttcaaacttaggaaagtcaggaaggctgggaggagtcagacacataccctaaatttttcaggaagttccaaacaagtattatcttgtggtctgaggctgaaagggaagcagatctgaaagactgagtctcaaacccagaattctgagtgtgacagtcagcaaaatgaggaaaaaagaccacattgagagggaaagagaggaaactaggccatctaccagaaaagcatctagagctttaagaatggtatgggggaggggtgggctgggtgcggtgacttaggcctgtaatcccagcactttgggaggccgaggcaggtggatcacctgaggtcaggagttcgagaccagcctggccaacatggtgacacccagtctctactaacaatacaaaaaaattagctgggcttggtggtaggtgcctgtagtgccagctactcgggaggctgaggcaggagaattgcttgaacccgggaggcagaggttgcagtgagccgagatcacaccactgcactccagcctgggtgacatctcaaaaaaaaaaaaaaaaaaaaaaaagaatagtatcgggaaggtgaaaacctgccgggagctctgaatcatgaaagacatggagaagtgaggagaaggcagtcccttttatatgtctgtgtaaggaaggagatggagggtaggtggtcaagggcaaaggaaacactaggatgagaaaatggaaatta

SEQ ID NO: 139529 - DNA, 1066 bp, Homo sapiens
cctagacctctctgcatctgggctagacttgaggttttcccaggtcgttccagctctgtagttctgtaaactctgacattgaggtgtacactagcaggtgcttgaaagataaactggtccaagggcaagcaggctctgggataaggccaggccaggtggtggtaagatgaaaggcagacattttgcaatgaggtggtagggtgaccatctggagacaagaatcaataaagctcttgtctgactggtagatgtttgttgttttgctgtggtaagtgatcgatatgtccccctgtttgggctccaaagtattggcttggctctgctgtggacaccactcttgtctcagagctgtggtgcctgcctaggcgtggaacactcctcccaccgagtcccagcagaaacactgagcgggtggggggctgtggttcaggggaatgtgcaaagcctcacccaccagcttcagcattaggcatttctccttcctgatgtctcagagcctgataggatatgttcaggctggactgcctctgaacaggccaagtgttacctgacagcttccaaccacatagggtaggtgccagctgcctgagcacctcagtgttcttgaaatacttggcaaggccccaagaggtagtagctctttctaaccagggttctcgccctgagcagcctccaagccaggagtaggtaggtaatatatgtgtcatccccaggccactgagtttttgaactgagcatgtgtgttttggcttttgggtctggggtgggggtaataactggggaggggagggaccatgctgaggatgattccctcagggtcttgccccttccccaaaccagaaggagtatgtttctttcctagagcagctgagtgggctggagagatcctttgcggaatccagtagttgacaaagccttcattcttttttgggatcggggaactgcttggaagttctagggggacatatggccatgatgactggctgcttcctactcccatgttaagaagcataatctagaaagatctgcagagccttcttcaaacagaagtgttagtcacaggtac

SEQ ID NO: 139530 - DNA, 1080 bp, Homo sapiens
ctttttttttttttttttttgagacaaggtctcgctctgtcacccaggctggagtgcagtggcgcgatctcggctcactgcaacttccgcctcccaggttcaagtgattctcctgcctcaccctcctgagtagctgggattacaggtgcccaccaccacgcctggctaattttcgtacttttagtagagacagggtttcgccatgttggccagtttggtcttgcactcctgacctcaagtgatccacccaccttggtctcccaaagtgctgagattacaggtgtgagccattgcacctggccttttttccaatagtcttgaatggatgtcaaattagagaattgcaagccactgaggctgactttgcatgggctattcggccattggagaagagtacaaagctggatttccattttgctcagggccctagagctcgtgtgtgtgctttctcttcaactcctgtcctttttgtcttcttcacagatggcagaagattttcaagtcccggctggtggagttgttagtgtcctatggcaacaccttctttgtggttctcattgtcatccttgtgctgttggtcatcggtgagtgagctatggctgagggcagctacctgacctagaccctggtctctgctgcaaaaccctttgccacttttgatgtgtagcatccagttttggctgctaggagacagaccaatgaaatgctgtgtctttctcttgagggagggaagaggctccctttgcccatgctgctgaccgctagtcggttcttcactttgaggcccctctaggccgtacatggtggctcatgcctgtaatcccagcactttgggaggctgaggtcggtggatcacctgagatgaggagttcgagatcagcctggccaacgtggtgaaaccccatctctacgaaaaatacaaaattagctgggcgtggtggcgggcacctgtaatcccagctacttgggagactgaggcaggagaattgcttgaacccacgaggcagaggttgcagtgagcctaaatcgcaccattgcactccagcctgggcaacaagagggagactccatctcaaaaaa

SEQ ID NO: 139531 - DNA, 1343 bp, Homo sapiens
agcgcttggactaggtgcggccttgggcctgcctggtagcggggatttgggcccgcagagcgcccgcctctgcggctgagttctgcctggcggggaagggagcgcccgatgggtgccgaggcgtcctcctcttggtgccctggcactgctcttcccgaagaacgcctttcagttaaacgggcgtcggaaatctcgggcttcctggggcagggatcgtcgggagaggccgctctggacgtgttgacacacgtgctggagggggcaggtaattgaccagcgaacggaagtttgtggggcctgtgaacgctgctggccaagaggccctgccgagtggagccctgcttccgccagcgcatcagagactttgaagcaaagtgcagggggtcagggtggagagtggcggccccagcctcgcagggtaactgaactggatgttcttggctgcccagcgcttacaagtcccgtaccttttgtgccctgccaggaaacaagctcacatcttcctgtgggaaaccttctagcaacaggatgagtctgcagtggactgcagttgccaccttcctctatgcggaggtctttgttgtgttgcttctctgcattcccttcatttctcctaaaaggtatggcctatggagcaagcaggcgagttaggcaggagggtgcctgtgccctagccctgggactggtgtgtgcagctggtggaccctggaattgggacccgatggaacaggtagaacctgtctggggtgggggtggcaggggttgtgtttgttattgccaacccttcccagggttctgcttcgtcatgacttgctcagttccttttcctgtgtcccctgccttctggtcttcagaatgcccccgagaggcaggaagatctatgttacagttctggaaatgatgccctcccacccactcttggtccacggggtgctgggatggtagcgtgggattcggaagacttgcaccactgggtcacgttgttgctgatttggtgactcttgtcctcctaactagtctcactggtattgcgcagtggctgcatgaacattactcagcctgtggaggatgaagccatattcccttttaatgaacagaggacctgttaaaagtgaattggagattaattttaattatgtataatacctgaacacatccctatttaaattacgatattacaaataaggccaaatctccacaggtatttttaaaagccgttttttcgtgaaaaattatctttgatgtgataccatagaaagtatgcagtgctgtctgaggaggattcttgtagaaaaccacaccttcgtacagttgacaagacgtgcagagatagagggccccgg

SEQ ID NO: 139532 - DNA, 1021 bp, Homo sapiens
agtgactcctccaccggcccagaatccccacccactcttccccaggggcgagtcgggggaaggggaggaggcggaggaggggcgaggggcggagtccgggcgcgggagccccaccctgttctcgcccctcggcggggcccgcccacacccccacctcccgttctcgcccctcggcggggcccctcccgcaccacagagacgtgggacggccgcgcggactagagaagcggccctcgccggcccgacaaagccccgccccgccccgcccgcgtgctcgctccaccccgccctgctcgcccggagcccgaggcgcctcttcctctcccgctcggagcgccggccctccgctccggggcggggtgggaagcggaggtgggcggagcctccggggcctcgcgagggctggtgggcggtgcccggcgggcgcttccggtttccggccgcggtatgaggggcggggccggggctgctgtgggagagttctgttgctgcggcggggcctgcacgttgactgtgggaaactcggtgagcgggctccgcgcgccgggctgggctccgggaccgcggaggctccccggcccatcgacgagggagagaggcgagcggcgcggggaggcccgggggccggggaatctcggggcccgcagcctacctgcgtgtgagaggcaggggcgaggggaaaccgggcggcgcctctagaagctggtctcgggggcggggcggggggcggtgaagccccacctggaggagcggccgggatgggcctccgggacggtgtgccaggccggggccaagtcggaggcccctcgctctgggtgggcgctggggcccgcgagggctactgtaaggacccctggcttctgaggatactgcgtctagaactttctccgtatggggccttgaggtgcttggtcgagacctgcctttgcgcttggtcccgaatcctgccctctaggagtcgctcttgcgggcctccagcccaccggaggcgaagcggccccgggcggaaggccgctggatc

SEQ ID NO: 139533 - DNA, 1026 bp, Homo sapiens
gaagcgcacggccgtgctcctggccctcgcggcctatggagcccacaaagtctaccccttggtgcgccagtgcctggccccggccaggggtcttcaggcgcccgccggggagcccacgcaggaggcctccggggtcgcggcggccaaagctggcatgaaccgggtattcctgcagcggctcctgtggctcctgcggctgctgttcccccgggtcctgtgccgggagacggggctgctggccctgcactcggccgccttggtgagccgcaccttcctgtcggtgtatgtggcccgcctggacggaaggctggcccgctgcatcgtccgcaaggacccgcgggcttttggctggcagctgctgcagtggctcctcatcgccctccctgctaccttcgtcaacagtgccatccgttacctggagggccaactggccctgtcgttccgcagccgtctggtggcccacgcctaccgcctctacttctcccagcagacctactaccgggtcagcaacatggacgggcggcttcgcaaccctgaccagtctctgacggaggacgtggtggcctttgcggcctctgtggcccacctctactccaacctgaccaagccactcctggacgtggctgtgacttcctacaccctgcttcgggcggcccgctcccgtggagccggcacagcctggccctcggccatcgccggcctcgtggtgttcctcacggccaacgtgctgcgggccttctcgcccaagttcggggagctggtggcagaggaggcgcggcggaagggggagctgcgctacatgcactcgcgtgtggtggccaactcggaggagatcgccttctatgggggccatgaggtggggcaggttggggtgccgggcacggagggaagcgtgtggcagggaggcccgggggcaggcagccgtgagcggtggggacagtctggggcgggccggggctgatgccaaaggtgtgggcaggccatgggagagccgggctggggtgggcagggcctttgggcagccgt

SEQ ID NO: 139534 - DNA, 1051 bp, Homo sapiens
tgcatttgatttttagtccattagtggtcaccctttaaaaggtcaacacgcagccgggcgcgggggctcccgcctggcatcccagcactttgggagggtgaggcgggcagatcacgaggtcaggaggtcgagaccatcctggctaacagggtgaaaccccatctctactaaaaatacaaaaatttagccgggcgcggtggcgggcgcctatagtcccagctactcgggacgctgaggcagaagaatggcgtgaacccgggaggcggagctggcagtgagcccagatagcgccactgcactccagcctgggcgaaagaacgagacttcgtctcaaataaaaataaaaataaaaaataaaagatcaacacgcatacttgttaggttaatcaatagctccgccttctcctggaccttagaacgcagaagcagccccgtggggcatggcatcatagcccagccaagagttggatttgtacctagtttttcctctttgctatcgccttatccacacgtgttgaaactcactcgcatgtttgctgagttctgtgctcaccatttcgttcctacatctcaatttctcttctatgttctgttatcttcctccagatagacatgtttttagttttttgtttgtttgttttttaactcacaactatgctcaggacaaacagtcatcagtgcttctagttgtggttggtttttaaaaaaggttctttcagcaagggttttgtcatgggaaattcttgattattttattgtaattctttgtgttgtttagttttttgtttgtttgtttgttttttgtagaggcaggttctcgctgtgttgcccaggctagtgtggaactcctgggctcaagcggtcctcccgcattagcctctcaaagtgctgggattacagacgtgagccaccacacccaggctgttgtcattcttgattatttttgttgaaaatgtttctatttcacccttattcccaagctaaagttgagttgcgcaatggagtctaggtggactgttcttttctctcagccctttcacaatgtctcatt

SEQ ID NO: 139535 - DNA, 1120 bp, Homo sapiens
ggcctaggtgacctgggccctagatcttcctgtaagttccagaaaccccaggtgggcgcatccaccctgggaatgtcctggtctctctgggactcagtggaccatatgcacagcaggggtggggcagcaggaaaggcacctgttggtcttccagatgtgcagggtccctgggtcctcgatgccgtgcttctctgctagctcatccagaaggtcaaacaggtacttgacggcgatggggatgggccggttcacgctgagaatggcctggaaggtgtcgtccacaaacttctgcagcgtgccctgcgaggcaggggataagggctgtgtggagggcagggtgtgggggccatccacggctgaggctgcccctgcccctcccacaccctggctcggtcggggtccctggctgagcctcctctcaggcccagccacccaggccgcaccaaccttcatggacagcagacgggtgaggtagatttccggaatggccttggcccttgctggctcgcgctcccgcaggctgctgcaccgcaccttggccccttctggctcctcggtggctttcaccaggtgccagaggcacacccccccctcctcgccatcctccagcgtgggtatgtctgagggcacaggagcctggcttcagggctataccccctgcccctggcctgggatgcccagtccactcccccgacaaggtggggcagtgtggggactggaagaaaggaaggagatgggcagaagatctcggtggggtgggggatgaagttgaggcagatgcatggccaggagttctgcctgcccagcctggactccagtggccccaggtcagggccgagggactcactctctcccaaggggcacctctgggccaggctctgggagatggtgctgccacggtgcagctgagggacgagccccactgttgctccatctgggacctggcagagatggggagcggaggctgtgctgacccctagccaggcgcctacaccgcccacatcctgccctgcctcgcccttccccgccccagacccgccctgccctgcctcgcctcaccctgccccaccccatccctgcccttccctgccttgcctcgccccgccccgccccccatccc

SEQ ID NO: 139536 - DNA, 1098 bp, Homo sapiens
ggacaatggtctctcttttggggtcactggggtcgctgtcccggacctggagcaaaagccaaggggccacagatggttccaccctgccctgaagcccacagctcccttcagtgtacccttctcctgctccagctgggccctgctggaagaaaggccgccaacccctcctgtccctcgcctgttcctccagatcctcccccttgggcacagccagctggaggctgcccctcagggagccccgccctgccccacagagccccggcaggccttgcacccgcattgccaggccccaggcagctccaggggagctgggagtggggtagggaggtgcctcacacatttcaggagcttgatctcatccacagctgtctccgtgtaatgccccgcactcttcaccactttgagggccacaaagcgcttgcgcctgcaataccgagacccttgtaggctgtggccctggcaggacccacggcggggatcagggtggccccaagcaagcccagggacaggatcccagccagtgctgggccccggaggcgaaggaggcactcactggatgtcccagcagagccagacggtggagaagtggccccagcccagtttgcgcaccacgtggtaccgcccattgaacacgtcgccgatcttcacagggtggtagccgcctgcccaggggagatgtagattggggtggagggggttctcactcccctgggcccccgaacacctcggccccattgaccatctggcccatgtgggcccaggactgccctgggtccctgcagtggccgtgaggccgcatgtccccaaggccaagtctcacccttgcagtagtctttggggtcttcctgttcctcgtcgtcggagcccagaaggccctgcagcatctgaggcaccggtgtggccagggctagttcggagcccgaggactcgggcccgcaggaggcctgtgagctgcgggtggggtgagtggcagtgggcatgagagacgccaggggctccgggtgccccagccgagccctacctgctgctactgccgccgctgccgccgctgtccccaccaccgcccgtgctggcgctcatcccggccacgcagcccgc

SEQ ID NO: 139537 - DNA, 1308 bp, Homo sapiens
cctctgcaggtcccgcagccgctcctccagcagccgcttctgctgtttccgtttgcgcctcatcttcttcctcttgtttttggacagcttaccggtctgctgtcagagccagggtcaccccagggttcctgtcgcccgccccagtcagcatgaagtggaggtttccctgcacagccgccagggaagaggcctctccgggccccagggctcccatggacaccagaatgtggcgccagcgccccttggcaccagctactcactactctccctgcctccccgcctgtggccccactccccacagctccattaggagtgggaagacctggccggcccgcctcagggtgctctctgtcccctctcagcccaagctaaggcaggcggaagtggccattcggggaagacagcatcctttcaccaagagcagtttggggcacttgaccccccccgggaattaccgtcagcccagccacccagcctttcgggattaccaccgtgggagtgcgtgaaggtggggggtggagccactgtggctccagagatggcctccagttggctcagatgggagaggaggcatgggagagaggggccccccaacttaccaagacctcctggggggcagtgctgactgggagtgcaggtggggagcggtggggggggacagggaggaacagagactcaggcaggggttcaggcccagaggccccgacccagccccatgtgggcccttggtacctatggagcgggaggggggcggcgcccctgcctgttgccactccgtggcctcggcagccaggcgcctgatgtaagcgtcccccacacacagcaagatgttctcgggcttgatgtccgtgtggatgatcttgcacttggtgtggaggtagtccaggccgtgcagcacctgcagagagtcgcacctgacctcctccaactcccgcccaggccaggctgggcagcccagtgggtggcactcacctgcctcacgatgctcttcacgcagggcacgggcaggccctggtagttggacttgatgatccatttgaggagctggtggcccagcacctccagcaccatgcacacatctgggctgggagtgaagggcggccagtggacaccagctgcggcacaggccccacccaccctcagctaggggagcagcaaggcttgggccgtgtggaggtggggaggcagggcctcccctgggcagtcctggtcaccattatgctggtgtcatcatcgatagtgtccctgtcagtctcaacaggtatgccagttgggatggtgcattttgtggtcatcctagaggtggcg

SEQ ID NO: 139538 - DNA, 1032 bp, Homo sapiens
atagcggcctgagagggcgaaggctggggggatgtcccccagaagctccactatgtgagcgatgtggtctgtgggcagaaagaggaggttgggggcaggcaggccgggaggccgggaggctgagcccagagccctcaccccttaccctcatcacgactgtagtcttctccagaatgcggctcgaacaggtagtcaccagtggccagctcgaaggcctggaagggggaggaggtgaggctgctggctggtgggctgctggccctgggcacagggcagcccgggcgggcgtaccatgcaggctgtgctccagatgtctgccggggggccgtattcggcgccgatcagcacctcgacggcccggtactgccgagtctggatgtcttccgtgaagtgcttgtgctggaagcaaggggagccctggggacgggctggggccaaggctgtcctgcccccacggactcctgccccaccccgatccgcctacccgaggagctcagtggggtttgctgtgagcctcggggtccccaggtcctccaagagggacaggcccagtgatgtgaggctgaggctgatcccttcctagtggcccctgcccttggccatggccccagtgctgttgactgggcaggaccagtgcccacccagccgacggttcacgtgcactgcagactggggtagggctccccaagagcggccctgtgcctccacccttggagcagggccccccactctgctctcccacacttgctcataccacccagcaggcgttgcccaggtctgcgatcttgatcttgatcttatctgcattttggggctccagggggttcaccaggaggttcgaggcaccgaatggtgctggggaaggcagagcagggagactgaagtggtccgactactgccagccctgcctgcccaccacttgccacccaacttactgctaggcgacaggaggcccccggtctctcgctgattggacgagccggagaggatggagcaggaggcaggagagaagagggagccggagaagcctga

SEQ ID NO: 139539 - DNA, 3102 bp, Homo sapiens
ttgctccagagcctggatggagaatggcatggctgcctggctggttgccagcctttattcatttattgacttgttcattccgtcgttcaggggttattcatggagcacctgctgcaccaggtgcccttcgagatccctgagcgtgtagcctcgtggggcttaggctggaagttgcattctagcattctagtgttcaggaaacatttttgctccccaagtcttctgaccccggcagccttcagctgccctgctgaggtggggcggggatgggcagtgccactaagcctgtgttgtgttttgtaggcaacatcgaaaccaaccataacctgccaccgtcgcacaaatctcgaaacaacatccttcggtgagatccgggtgtgcgggctgggggcttggtggggctaaggtggggtgagccagtggagtctggctccagtcagccacctgtcaggcctagcagcctctttctccgtcccctcccagcaccagcctggacctctatgccaacgtcatccactgtaagagccttccaggcgtggtgacccggcacaaggacatagacatcctcattgtccgggagaacacagagggcgagtacagcagcctggagcatgaggtgtgcatggggggcccgagatgagcccccccagcgtcaagattaaggggagagcttaaggaaccagggacaggtgtacccttagagggcaggggctgtgcccgagggagaagccagaaataggcagacagggttgcttcccacggtggcccggtcgcgccagcttgtttggccagtgctgctcttcagtagcacatgggtctcttctccccatgccctcctcagagtgtggcgggagtggtggagagcctgaagatcatcaccaaggccaagtccctgcgcattgccgagtatgccttcaagctggcgcaggagagcgggcgcaagaaagtgacggccgtgcacaaggccaacatcatgtatgtcccctgacctctctgcgagcagtccagaagcagctgcagtggcctgcttgggcctgctctgagggatttgtggtccaaaagcccagctacccaccgaggtgccaccctaggcgagtgccctgttgccctcgaggccttgccagaacccacacttaggggaggtggggtgggattctgtccattttgctggtgagggacaggttagaattcagaccccagcctcctggggccctctgcacgccccgtccctctggctgactgttgcgatggccaagctggtgtcctattcctaaccccccaccaggaaactgggcgatgggcttttcctccagtgctgcagggaggtggcagcccgctaccctcagatcaccttcgagaacatgattgtggataacaccaccatgcaggtattagcctgcccagtgctgtccccctgccctgagtgccctgggcttctctcacccatgcttccgaatctgctcctcagccagccccctccttgtcccgcagctggtgtcccggccccagcagtttgatgtcatggtgatgcccaatctctatggcaacatcgtcaacaatgtctgcgcgggactggtcgggggcccaggccttgtggctggggccaactatggccatgtgtacgcggtgtttgaaacagtgagtgccggtggcagtgccgcggcttgccgcctttctcctgttcacagacttagtgaggcacactcatcccatccggttagcccgttcaaaatgcatgatttagtagttttttggatatccagggttgtactgccgtcaccaccaggtcattccagaacattttcaccaccccacgaggaaagcctgtccccataagctatctgtccccacaccttcccccaacccctggcacccgctggtgggcttttgtccctgtggagtggcttcttctggacgtgtcacaggagcagagtcactgcccggcatccttctgccctccacccactctccttcgtcttgcctccccaggctacgaggaacaccggcaagagtatcgccaataagaacatcgccaaccccacggccaccctgctggccagctgcatgatgctggaccacctcaagtgagtggctcccagtgccccgcaagcccctggccagccctccgggccccagggactgaaggctggctgtcccatcctctaggctgcactcctatgccacctccatccgtaaggctgtcctggcatccatggacaatgagaatgtgaggttcccctcgcaccctaccctgctgccccgcccagtctccccctgcagcctcctgtagcccgcctcatgcactgaccacagcccccaggggaggatggtactggatctggccccatcttctggcccttagctggtgccacttccctcctgtggcaatcccagtcctgcacgtcacaggagacagcggggggtggcagggcctggtgtgtgccgagcctgcctgtgtcctacagatgcacactccggacatcgggggccagggcacaacatctgaagccatccaggacgtcatccgccacatccgcgtcatcaacggccgggccgtggaggcctaggctggccctaggaccttcttggtttgctccttggattccccttcccactccagcaccccagccagcctggtacgcagatcccagaataaagcaccttctccctagacttggcgtgggcctccctcactccaggcaccgatgttcagtccacactttattaagaaaggaatacacacactttctccgagagccctcacgggggtctcaggcagaacacgctctgagagccgggcctggctccagcgtctctctgccctgtggttgtggagaactggcgcccagcagggtggtgggagctgtcccgcttttcccttaaggcacggagagctggaggtggagccacagccgggcctaggggttgagccaggggtgctggaggcagtcagcggcactggcccgcttttcggggatgtactccatcatgggcagcagaaaggcgctgaactgtgtggcctgctctaggggccactcgtacttttccatgagtacctcgtacaggccccagtgcttgagattgtggatgtgccgcagctct

SEQ ID NO: 139540 - DNA, 2618 bp, Homo sapiens
atcagaagcaaaaaagaggagggagggcagggacacgccttttaagaaattttctgaagagcggaaggaggcaggaggctggagcgccttctactttccaggtgctccagcgggccggccctggggactgaggctttggagctaattatctattgtgcccctggcagtgggccatgctgcacagacaggggacctgcctgggcacagtggggacggtccgtttttccttccaacttggctttctgggttagacatcaaaccaaccgctggcatttggtctctgccaggttctaggcgcccacgaggtcccctcgaggaacatcttttcagtaagtacctgcccgtgcccacgcatgtgtctttctccatgtggccgcaattgtgcgcgtgtgtgcacggcctgtgtcctgtcctctgagacgtggtctccaggggctacccacccctcttctgggagttgtactagccagcatccccctgggaaaaggtcccactttcctggtcacggccttgctcttggaaccttggctgattgtgtcttcttcctttctcatcctttctaggaacaaacaattgtgagtattcttctctgcctgttaggtttggggggctcttagttgctttggggttaactaaattccaggtgggggtgggctgctgctgacccaggagccctggatgagcagccctgtctgggacggggctgccccaagttggcaccttgtgacggggcagcctgtggggtcagcgccagtgggaagaagggaattggcttgagcccatgggggccgagctgggggcatgtgggatccccgaaggcccaccttcaccctctgcctcccacagcctccgtccgctaagtatggcgggcggcacacggtgaccatgatcccaggggatggcatcgggccagagctcatgctgcatgtcaagtccgtcttcaggtatggagctcctgggtccccgccttgtcctcagccagggggccctgaggactttgtgccaagaggggcattgcgcccagaagcactcggtgaggccatggcaagacgacctgtaagcccaggccttgcgtcccatggcctgtgatcccgccagactggcctgggctcggggaaggtggcaccagtcctgccacagtgtgcattgtggagttcaagcgtgtccccatcagtcagtgaaggtgggcccagtcccttctcagtcagagccaggtcagggcaggtagcaacaggagagaggtagcctgggcaggcttcctggaggaggtgcgggggggtctgggccagcctccctgaccctgccgtgcctcaggcacgcatgtgtaccagtggactttgaagaggtgcacgtgagttccaatgctgatgaagaggacattcgcaatgccatcatggccatccgccggaaccgcgtggccctgaagggtgagctccagggccaggggccaggatggggccctaggtgtgatttctttcttgctttcttccttcgtttcttgcttacttgctcgcttgcttgctttcttgcttgctttcctgctttcttgcttgcttgcttttttgctttcttgctttctttcttgcgttctttctgagatggggtctcgctctgtcgcccaggctagagtgcagcggtgtgatctcggctcagtgcaacctctgccttccagtttcaagcgattctcctgcctcagcctcccgagtagctgagattacaggcgcccgccaccacgcccagctgatttttgtattttcagtagagagtgggtttcaccatgttggccaggctggtcttgaactcctgacctcgtgatctgcccgcctcagcctctcaaagtgttgggattacaggcgtgagccgtcgtgcccagcccctgtgatttcttttacctccctctgagctgactcttgtggggccccacggctctgatttcagggcttgtctggctagagaggaccctcgtgcttggagactgggtggacgcctcctcgggcctgtttgcgctgcgatgctgggattcgagtgagagcagctgtgtgtgagcctgtccagtgacgggctccctgatgggttccctcccacccctccttccctcctgagacagtcctctctgctggggtcagctttgaccctcagcatctttcttcacaaaccaggtatcacagagatgcagttccgaccctctgcctggctcctcggctgcagccagcctggaggtggatggcacagcccaggcagggattcttggggcttcacttgaggtccttaaactacttccattgctcattttgcacactcagcccattacttgcactgtgtgaggagcgtgtgagcaaagatgaacccagggggagccccaggccctggcagtcaagtagaggggcctttgtgccagccacaggggacccccgcgctgtgagtggagcagtctgggtggggtaccgctcaccagcaggcggcctctgcttggcgccctctgactgctgtctccagcggccactggcctctgcttcccttcctccaggtgtcctgggtcgtagggtagggtccggccaatccgtggccttctccaggcagcccccgcctgcctctgagtgtggtgccttgatgcgggg

SEQ ID NO: 139541 - DNA, 1085 bp, Homo sapiens
ctgatggctccagcaactgggctcctgtaggctcttggtgaagacatgtgtgcctcctccctgacctcccctgtgtgtgtgcctgtgtgtgcgttggggtgggagtaggggacagtgaacggtgggtagctgggcagtgccttgccctgagactgaccgtcctgggtgtgagaacccttacagaggaaccccaggtcttgaatcccactgatttggacgccataggaaaacatgcagccaccattgacacatggtccaacagaaatatgccaaagacagaagcctcagcaggcataagatgtggggtgtggatgttctttctttccatggaaccatgaaagggtgatgggagagcgggaggcgtgtacatattgcatcctgcctcacacttggctcctttgattggtggcttcacagggaagtcagggcacaaggcagagcctttgcgacctcctgaaggaaggtgcctgcatctgtacagtaaggtcagggaagtccatctggagcgctctctgggtcttttgccaaagcccaaaggaacacctggcacagggaccgggtggcagagaggttcagctcagccctggtggtgatgttgccatctgtgagggaggtccatgctctcaggagattggcttgctgccacagctgaagcccaggaggaactactgctgggagctgcaggggtccacccgtgacctcccagggacaccagccttgaactctgacctgaggggccagtggggtgaaggggcaggcgtgctgtgtggcactagctactgtgagcagctcacacacctcctgtcccctaatctttccaacagtcacggaaagtaggtacctccgttctgtgaatttcagatgaggccatgaagccatctcaagaagagtggatggtggatttggaccgaggcctccctagtctccagatcttttttcattttctgatgtgcttgttcactcaggaaatgttccttatgtgccagctctgggccaggtactgtgctgggtcctagggtgacagtattggaccacactgacttggcccctcctctcgggctcaggggttgaggagggagcaatgc

SEQ ID NO: 139542 - DNA, 1013 bp, Homo sapiens
tcgggtgcggctaccccaccgctcccctgcgaccgctgccgcggtcccgtggctctttccctgctcacctcccagggacggcagagaagggctggcccgagcaccgccttcgcggcgctgccggcgacggtcgctaccttcagcgccatgacggaaagtgagagcctccgcacgtcccgacacgcagataccgctctcgcgagagttcgacggggtgcgaagtttcggggacaggcgcggacccggtactgcgcacgcgcgcggtcgcaccgattcacgcccccttccggcgcctagagcaccgctgccgccatgttgagggggggaccgcgaccagctgggcccctggctcagggaggggccacgtcagtgctgccagagacgtcacaatgccggcccagccgttcggtgcgcgattggctgccgctgccacttacgcgtcgctcttcctcgtttgcccctcgtgttcatgggagctcgttttcttttcctctaggcagagaagaggcgatggcggcgatggcatctctcggcgccctggcgctgctcctgctgtccagcctctcccgctgctcaggtagcggcccagccggggcttctttcttgcgagcctctgacccacggcaggtggtgttgggggcaggagggatgcgggggtccggcctttcagggtccgtcgctgcgggccgggccttcccccgagaggcaggcggccttgggacggggggaccaaagcacctcgcgcacgtttaccggcagccaggcttttccttgtctgcccatacgaagaggagtccccgagcctccatggtgcgcccggcccccaagctgcagcacggaacgtgacacatgtcccggctcccgctccctgcggggtcggaccggagcgaagctctgtagcgctgagcgatcgcggccaaaaacggggctggaggagccacataagctaggaagggacctcagtgaggagagggagcaagagcggggcgagttagatggggagccaaaggtgc

SEQ ID NO: 139543 - DNA, 2780 bp, Homo sapiens
ccagtgcattgcctgcctgcagcccccacccccgatgtctctgctgaggatgccttcagtaactcgtccaggccgtttgtggctctgaattgaggctggcgtggcccccgggcctccgtgtcataggtccaagtgttggcatgtattgtccagtgaatccagcccccacctgtccccagttcgctcttcctgcacacctccagaaagccggccttgcccctccccagccttccttcacagccatcccgcctacgttgccattgcatttgtgaccgagcacttggatctgtctcgcatatcccacctggaaggggcaggaagagcgcatgggtccccagctgatccgtgctatgaggcagggccgggccatcctgccctcagaccgggatactcgagctggccttacccaggcatctctccctcttccccgcagccgaggcctgcctggagccccagatcaccccttcctactacaccacttctgacgctgtcatttccactgagaccgtcttcattgtggagatctccctgacatgcaagaacagggtccaggtgagacagtggggtttcagacaggagggcgggtggggggtgctcctcactgctagttgatgggggacctgtgtcgatagagggagaatcaagattccaactcttggggtgccggagagatcagggcacggtgatgccagatcctagccagtgttgacaggtcaccttcctcacctgctttgtgtgctgtgcctacacgaggtaaccctgggctcaccacccgctgtttcctgaatgagtatctggaccgggagaaagggccaggagtcagcccaccccggttgccattggccagtttgtctgtgtgggtgttttgtttttgtttttgttttttgtttgtttttttgagatagggtctcactctgttgcctcagctggagtgcattggcacgatcttggctcactgcagcctccacctcccgggttcaagcgattctcctctcagtctcctaagtagctgggatgacaggtgctcgccaccatgcccagctaagttcccataagtccaaagaaggaaatggggccttttttgggtatggccctcttagggtaaagcaccccttgggcagcccactgggcacccctgaccccagcacctcccttgtagactcaggaaatcactcagcccttttgatcatcccgcccctgctcacagtcaacagggttcctatgcgtccagttaggcccggccatggggatctggccttgtgcccccgtagggaagaccaatgcagagggccagtcacgggattggtgagtgttacttggtacctcctgccagggacactgcagcccccaactgggcctagcctgcccacctgcaggccgtgtgagcagcgcacagggctcctctgcccacacccagagggggcagaaggtgaccctgcctttgttccctcacccagaacatggctctctatgctgacgtcggtggaaaacaattccctgtcactcgaggccaggatgtggggcgttatcaggtgaggggccaatggttcccttgctagggggctccctgctcccgggtgtgacctgaagccccaggggtggccggtcaaccagggccaggggccgtgggctctggctgccggagtgctgcagtgtcggcactggtggtcagggtggcccctccgtgtccactctgcccacactctgctcaacacccaacccaggtgtcctggagcctggaccacaagagcgcccacgcaggcacctatgaggttagattcttcgacgaggagtcctacagcctcctcaggaaggtgaggactcctgtagcccactgtgctcccctgtccctggggagcaggatgggctgggttgggaggtgctggcagcaagtcctgagctgggtggcctttctgtgatcctgtcccttcctcagtgtctcttgcccatttctctcctttccttttctggggcttgggccggtgttcctacctgtctttcccctcccctccccacccccacacgccaggcacccctgaccccagcacctcccttgcacctcccttgcaggctcagaggaataacgaggacatttccatcatcccgcctctgtttacagtcagcgtggaccatcgggtgagtggcctggtccctcctcctttttggggttgttgggctgagtgaaggttatcctctccacagccccagctctgctgctgggccgtgattggccagcatgtcttggttcccctggcggaaggtgaccagggctggctggtctgctcacctgtactcccctgagctggcttgtgatctcctttttttcagggcacttggaacgggccctgggtgtccactgaggtgctggctgcggcgatcggccttgtgatctactacttggccttcagtgcgaagagccacatccaggcctgagggcggcaccccagccctgcccttgcttccttcaataaacatcacaggacctgggactgcacaggacctggggctgctggcttgcgttattgtgccttcccccgactgggagagctgggggcccagcgtcctcttgtctgcctggccagcagaggcaccaggcaggaaaggggtgggctttggtctagaactcccgtccctcctcccaatgaagccccccgtctggtccccacaaaaccctgtatccaccttcccagtgactctctcctggttctggtgagggcagtgggcttggccacctcctccccaggtggccccacaggctccatggggaaacagccagcctg

SEQ ID NO: 139544 - DNA, 4677 bp, Homo sapiens
cgaacccatcttgggcagatgtcttgtgtatccccaggagggggatggcccctcgctcccctccctactagtagcatcccactaaagccacccttccagatggacaatgtcctacttcccaccaatgcccggggctgaccaaaagcacaggcttccgtgcagaagagcctaggagtgcagggcaggggcggggagaggtgactactccacagcctctgcctctgcttcctggggctcagagctggaaggggagccagagagccttcagcttgctttgggggcccctgaggtgagcctgcccccttctaccgaaagggcatgttaggcaccaagtccccaagatgcgtgtgtcctgcaggtaaatcccaacagcattgcagccaaagacggccggatccgtgagggagaccgcatcatccaggtgagcacttgcaggctgcaggcctggcccaaggccccgctgtgcccgtcggcccagccacctctctttagccagtccctagctctctcccactaagagctaaccctgaggcccagcagcctgccgtgtcctaaacccgggctgagtctcatctctctcctgcccactcaccccagtggctcccgtgtgcctatgggatctgctggcatccagggcccctgctgctctgaaacctcctggcccctctccctctgccccactccatgctctcctgagcacacatttgctcttgcaagagtcaggccgccctctccctggtaccttccacttagttacatcctcccagagctcaagccccagcctagcccagccgagcccagagtgcttgggctccctgcacccgcccagggtccgccccagggccagccctagcatgcttgttgattgtatcctgcctgcctcagattaacggtgtagacgtccagaaccgggaagaggcggtggccatcctgagccaggaagagaacaccaacatctccctgctggtggcccgacctgagagtcaggtgtgtatgcctggcagggcgacccggggccacgacatcaggctttctgtcttggaagctgctggccgtgactagggcacagatgtgccaacgacctggagttgatggagggcgggtgggcaggggtctctcagggcccgtttcccctcctggcctctgaaggctgagggggctgggacgctgcccccaggttgctgagcttcaccgaaacaagccaagtgcggggtccagagcagacaagaagggtatatggggaggtccttgaagctgtggggacaccagggcctgtctccacagctggcgaaaaggtggaaggacagcgaccgggatgacttcctggatgactttggctctgagaatgagggggagctgcgtgctcgtaaactgaaatcaccccctgcccagcaggtgaggaaggaaaagggcgctggtggggagggcgaggaggagagaactgggtggaaggcgctgaggctgtgcagggtctcccaatgcttggcagggaaatgaaccaggcctgaagccccttccgatcctcctgtgacatcccgtgacatccctgtccgtgggacctaactgagcggtacttacctttctgctctagcccggaaacgaagaggagaagggggctcccgatgccggcccaggcctgagcaacagccaggagctggacagcggggtgggccggactgacgagagcacccggaacgaagagagctctgagcacgacctgctgggggacgaacccccgagctccaccaacaccccgggaagcctgcgcaagtttggcctgcaaggggacgccctgcagagccgggacttccatttcagcatggactctctgctggccgagggggcggggctgggagggggcgacgtcccgggcctcacggatgaggagtatgagcgctaccgtgagctcctggagatcaagtgccacctggagaacggcaaccagctgggcctcctctttccccgggcctccggaggcaacagcgccctggacgtcaaccgcaacgagagcctgggccacgagatggccatgctggaggaggagctaaggcacctggaattcaagtgccgcaacatactgcgggcgcagaagatgcagcagctgcgtgagcgctgcatgaaggcctggctgctggaggaggagagcctctacgacctggcggccagcgagcccaagaagcacgagctgtccgacatctccgagctgcccgagaagtcggacaaggacagcaccagcgcctacaacactggggagagctgccgcagcaccccgctgcttgtggagcccctgcccgagagccccctgcggcgggccatggccggcaactccaacttgaaccggacccctcccggccccgctgttgccacccccgccaaggcagctcctccaccggggagccccgccaagttccggtccctctcccgggatcctgaggccggccggaggcagcacgcggaggagcgcggccgccgcaaccccaagacggggttgaccctggagcgtgtgggccctgaaagcagcccttacctctcgcggcgccaccgcggccagggccaggagggcgagcactaccacagctgcgtgcagctggccccgacgcgaggcctggaggagctgggccacggccccctgagcttggccggtggccctcgggtgggcggggtggcggccgcggccactgaagcaccgcgcatggagtggaaagtgaaggtgcgcagcgacggaacccgctacgtggccaagcggcccgtgcgagatcggctgctgaaagcccgtgccctgaagatccgggaggagcgcagcggtatgacgaccgacgacgacgcggtgagcgagatgaagatgggccgctactggagcaaggaggagcggaagcagcacctgatccgggcccgtgagcagcggaagcggcgcgagttcatgatgcagagccggctggagtgcctgcgggagcagcagaatggcgacagcaagcccgagctcaacatcattgccctgagccaccgcaaaaccatgaagaagcggaacaagaagatcctggacaactggatcaccatccaggagatgctggcccacggcgcgcgctccgccgatggcaagcgggtctacaaccctcttctctcagtcaccaccgtgtgagctgcccgggcgggtacacggcccaggcccagggaaccccctggggccccggccctcactctcctatagagattgtgtgtgtgtgtgtgtgcgcgcgcgcgtgctcgctgtgcgcacgcacacatctcctcgtctgggtgtgcgcacagggctttgttagcagagagaagcccctgaggagaagggacgcttttcttccttctgcccaagtaaagtgaccatgccagtggccagcactgggggcacacctgtgatgggcaccccttcagctgtgcgtgtgcattccccatcccccatgctcttgcgtgtgcttgcacgtgcacgcacacacacacccagtgctctctccacccgacccgtgtacttgcagacagggaagctgagctgaaaggagcacaagagagtgtccggcttcgctgctgagcgcggcctctccccgccgctgcgcactgcagttatttgtagacaaaggcacccctgatttttgtggtttttctccctttctgtgcttgccaatagttgttttgttttgtggacctgccctgggggctggcagctccttcaggcagcctggcagaagtggaactcccctctccactgatggctgggaagggagttggggaggaagagtgggagggagggctggggatggatgggagggaaggggagggaaaggtgggaggaatgggaagcagctgttctggtggcttccactctgaggtgtgggaacggggagcctctggggggcacctgtttccccagtgactcagagagagcaagactgcaggaacggaggggtcctgcagggtgtccaccaagaagtcacagagcccgttctgcgccccacaccatctggagcaggggcttctcttctgagtgaactgaggaaggtgcttagatggtgagggctctagaaaccaagccccatgagcagcagtggaagacctcgggccatgcggcctggggaggacttggtggcgatccgcaacctggaccccagtgagaggcggtgggctgactgggaaggagaggcccccaacctcctcaggatttgcacgtgtgaactaggctgcctgtggggtgccccttaggcttggagagccccagattggaggcagacagactgcaccaccccttccccccctgcatctcaagaataaagcaagctgcctttgtacttggttgaatcgtggcctccctgtgttcattcttattgggctggggaaagagttgtcagtttggggtgggagaaggaagaggggggcagggttagggtcaactgaaagccacgctgcagccctcggtttgtcttggatgtcaggagcagtgactgtgacctcccatggacaattgtgtggcactccaggagatataccagagtcgcctgagtcatttcagaggtgtcacagtcacagggtggtgaccagatgcagaaggctggcagaagcctgacttcagactagcctccaggcaagggccacggtcatctccatgggccaaaccgtaggtggggcccgctgctggcacatgccacagag

SEQ ID NO: 139545 - DNA, 1116 bp, Homo sapiens
aacaaaacaactattggcaagcacagaaagggagaaaaaccacaaaaatcaggggtgcctttgtctacaaataactgcagtgcgcagcggcggggagaggccgcgctcagcagcgaagccggacactctcttgtgctcctttcagctcagcttccctgtctgcaagtacacgggtcgggtggagagagcactgggtgtgtgtgtgcgtgcacgtgcaagcacacgcaagagcatgggggatggggaatgcacacgcacagctgaaggggtgcccatcacaggtgtgcccccagtgctggccactggcatggtcactttacttgggcagaaggaagaaaagcgtcccttctcctcaggggcttctctctgctaacaaagccctgtgcgcacacccagacgaggagatgtgtgcgtgcgcacagcgagcacgcgcgcgcgcacacacacacacacacaatctctataggagagtgagggccggggccccagggggttccctgggcctgggccgtgtacccgcccgggcagctcacacggtggtgactgagagaagagggttgtagacccgcttgccatcggcggagcgcgcgccgtgggccagcatctcctggatggtgatccagttgtccaggatcttcttgttccgcttcttcatggttttgcggtggctcagggcaatgatgttgagctcgggcttgctgtcgccattctgctgctcccgcaggcactccagccggctctgcatcatgaactcgcgccgcttccgctgctcacgggcccggatcaggtgctgcttccgctcctccttgctccagtagcggcccatcttcatctcgctcaccgcgtcgtcgtcggtcgtcataccgctgcgctcctcccggatcttcagggcacgggctttcagcagccgatctcgcacgggccgcttggccacgtagcgggttccgtcgctgcgcaccttcactttccactccatgcgcggtgcttcagtggccgcggccgccaccccgcccacccgagggccaccggccaagctcagggggccgtggcccagctcctccaggcctcgcgtcggggccagctgcacgcagctgtggtagtgctcgccctcctggc

SEQ ID NO: 139546 - DNA, 2774 bp, Homo sapiens
tggtctcgatctcctgacctcgtgatctgcccgcctaggcctcccaaagtgctgggattacaggcgtgagccaccgcacccggcctagtggtggctttataaggaccactttcttggcacctcttttaggctactttgcagttccagggggcttcttgtacatcaaggccttttctcttgggcaagtcagttgtcactgtgaggacacaacactgtatctttaggcatcttcctacttgtcccccaacctgaccctggccctccctagtgagtagacatttgttgagagactcggctcatctgaagagtcaaggtcatcctcttgcttgatgctgaatgagcacaacacagatgctcactgagtgttggctgttatggtccagtcattgccaaggaactcaatgggatcttcatgctagctctggcctcagtgccgccctagaaagaagtgggtccggatggggagaggccaggagagctcaagcagtgtctggaggacgttgtagggcggtatcacagcctccagacccagtgcacagaggctgggtcccccagtccttggtgtgacttggtgatccccagctggccttcagtgggatgaaggctgagcagtggggcttgcctgggaacaggggcaccaaaggtagccagggctgcagacagcagattccttgcttgagtggcttggggtgctggttgtcagcccaggtcctgccagctagggcctctgccttgacctcagaggggaggagcaagcctttgagggttcttacggaggcgtgtctctgccgcaggtgaacgggaaggagctctccaagctgtctcaggagcaaactctgcaggccctgcgctcctccaaggagcccctggtgatccaggtgctgagacgcagcccccgcctccggggggacagctcctgtcacgacctgcagctggtggacagtggcactcagaccgacatcaccttcgagcatatcatggcgctgggcaagctgcgtccgcccaccccgcccatggtcatcctggagccgtacgtcctctctgagctgtgagtcgccctcaggagggccccgggccctgcctccagagaggacaggccacctggagcggccatccgcacgccaccctctcgggcaggaagcaggcccctcggcctccagaactgaccgtggtacccaagggctccaaaacctccaggcctctagccttgggccgggctccagcaggcgccccgttgtatctacccccagggccgagggaggaccctcctgtccgggacgtcgctgccggaagtgccagggttgagggcctcagctcctcctcctccatcctctctcctctgccgcctcacaagcatcactccttgaatcttcttgcatcccttgtctgtctcattcctctacctgctctgaatttcctccatctcttcagcttctttctttggcccgaccggaagaagggcctttcatccaggcctggtggctcatgaccgcgtgagcgctgcctcattctgctaatcttagcccgggctgcggggaggtaggccacagggccatgagcagccaaccttagttttggggccaggagggcagcccctggaggtagggtgggcccccctctgctctgcagaagtcctccagggcctggataactcctgggggcgttgcatgagtggggccagtgctgggcgggcgggtgggcacccggagattggagaagttggtccctgccagctggcgtggttggaggagttctggtctgggggacgggaacgctagaggcatgcgcaggtcctctgcgtggacgctgcacactcaggtgcgagaagtgcccccggtctttgcatggctgcatgttgcccaggaaggggctctgcaggaggcaactgggccacccacccttgagagcacaagcagagcaggcctccgtgccaggcacgctgggatcggcctgcctgggagctggggctgaggtgtgagaggatggccagctggtctgacccccaccttctcctgggcagccccccaatcagccatgagtattatgacccggcggagtttatggagggcggcccgcaggaggcagaccgcttggatgagctggagtatgaggtgagccgggtggccaggccagggcccgcagccagctgcgggagccgccccgacgcctgtgtgccttcctgcccaggcccaaccccgtggccctcctggcacgcatctggctgagtcagggagggtgcgggtgaggttacgtgttccgtccatgtcggtgagtccacgtcccatgcacgtctgtcttctgtgtcctgtgcctgtgtgtgcctcgtgcatttcctgggagggagaccactgagtacgtgcgccacgtgggatggtaagagagaccctcaaagcggggcctggaaactgagctcagggggctccagaggaagctgaggggctgcgggctgaggggttgcgggctgaggggctgggctgtgctgcctgctccctcactcacgcatttctggggctttctacctctgcttcctcccggacccctcgtggcaggaggtggagctgtataaaagcagccaccgggacaagctgggcctgatggtttgctaccgcacggacgacgaggaggacctgggcatttatgtcggagaggtatgcagacgggtatgccccagccccgaggcccatccacatggcctgcctgtggctcagaggctgcccttaaggtcccagctaccagaaacagggcatcacagctagggtgctgcgtggtgaggc

SEQ ID NO: 139547 - DNA, 1022 bp, Homo sapiens
cgggtcataatactcatggctgattggggggctgcccaggagaaggtgggggtcagaccagctggccatcctctcacacctcagccccagctcccaggcaggccgatcccagcgtgcctggcacggaggcctgctctgcttgtgctctcaagggtgggtggcccagttgcctcctgcagagccccttcctgggcaacatgcagccatgcaaagaccgggggcacttctcgcacctgagtgtgcagcgtccacgcagaggacctgcgcatgcctctagcgttcccgtcccccagaccagaactcctccaaccacgccagctggcagggaccaacttctccaatctccgggtgcccacccgcccgcccagcactggccccactcatgcaacgcccccaggagttatccaggccctggaggacttctgcagagcagaggggggcccaccctacctccaggggctgccctcctggccccaaaactaaggttggctgctcatggccctgtggcctacctccccgcagcccgggctaagattagcagaatgaggcagcgctcacgcggtcatgagccaccaggcctggatgaaaggcccttcttccggtcgggccaaagaaagaagctgaagagatggaggaaattcagagcaggtagaggaatgagacagacaagggatgcaagaagattcaaggagtgatgcttgtgaggcggcagaggagagaggatggaggaggaggagctgaggccctcaaccctggcacttccggcagcgacgtcccggacaggagggtcctccctcggccctgggggtagatacaacggggcgcctgctggagcccggcccaaggctagaggcctggaggttttggagcccttgggtaccacggtcagttctggaggccgaggggcctgcttcctgcccgagagggtggcgtgcggatggccgctccaggtggcctgtcctctctggaggcagggcccggggccctcctgagggcgactcacagctcagagaggacgtacg

SEQ ID NO: 139548 - DNA, 1067 bp, Homo sapiens
acagcggtggttctactgtatcgcgggcactaagacaagattttgccgtcagaattgacatctctgtgagaaacccggggtgggaggtgccgccgtgagaatgcaggacagagagttcttctaaacttgctaatattcgcacaactcggaaaagcagagggctccgtgcaggcgcagccacctgcgcccatgcccagggcccttctgccctctcatctggcacaagctcccagcctgctccatccctaggcggactctgggtctcctcgccctgccctctctgtgctgactgggggctttgcttccaactgcaaaccagcctccctgggtcttttcttggccctgttccctttgcctgatggaggccaggtgtcccctgctccagaagccttccccgcctcccaccgaggcgtgcatggccagccgtgtgctcccttagctgtgggtaaggtctgtccccacgctcacctgcggggcatagccatttgggcataatgctagtgtgtagcctccccaggcccagaacagcccttccataagccgctgagcccatgaggagaccctgcacgcctgcctcgagctgcctcctcctagaagtgcttcctgctgacccttgctggccccatggcacgtgccctgaattctggtggagtctgttcagtccttcttggtccttagtcattcgtcccttctctacttgcctcccttccccaaggaggacttgaaggtcgcagcatactgtcccagggtgctgcggaagcagccttcgaccttgtgggcactgcttgccccaccacctgcgctgtgcgtaatgggcttccttctgctacccttcattgtccttccttcacccctacagcatcccgcagagctgcttaggtcctacttccgccttgggccctggcccgcgatggcctcctcctccctgacccctccttctggccaccgggcagcctgtcctggctcatgaccttgactcagtgccacaaccttgctgagcttgctgacatggtttcctcatctgcaataatggcatctccctcaaggttgttgggggttaggatttt

SEQ ID NO: 139549 - DNA, 1130 bp, Homo sapiens
tattgagaatttcgtctctatcccacaccataaagatattgttctcttgttttgctttgtccctgtaggtctttgatccaattggaattgcttggccagggcttggactaggtcttctgtcttggtggggcgagctcccagggtgtggaaacgtttgcaggtggggcaggagggagagtctggtgggaagcaagcctggggttggccatgttgagtgtttgtgccttttagagactggagtggtcgagtaggcaatccgagggttggggcattacaggggtggctttaccagtgtgctacctcaggatggttgggggtggggcggggaggcaaggctctgagcaggactggaagagctgctgtcatcagaagggccacagtgtggctccttaccatgtgcctggccctatacctctttgctcatggccccatattttcccaccttgttggtagcccttagcccttccccagaggggagctcatttcttccttgggggtccagcatgaccgatgaggaggagagagagagagagcgagaaggcttcaggagcccgtggcttccacccaaatacctgcctggctgtcacaggcgatcactctggttgctgctgatccgaggtgctgaggctgtgcccacgcccatccccctcttgacatcccagcctccgccagcccgcccagcaagcgctcctcagtttccatagcaacactgctgctcggtaatgattccgggtagaaaggcattcgtgcgttctctgtcatctctgtcacctgagcatcccactgcctgcttgctgtcctgccccgggagttcaggaagaaaccctgaggacagctccgagcccttctgcttgtgtgttggcttctcctcaagggcagtggtaaggtggtaaatgttcccagacaaaaagccctgatttggagcatttgccgatttccctggtgtaaatgctgccactatagccgatttcaagccaccactgcgatgtcactgaacttggagttgggggaatgcacacatagtatttccatctcccataccagatgtgaataaccccaaaagcacagatgacagaaaagtgtagtaagataattagacagtgatgtgttccgaggatttattgcctttg

SEQ ID NO: 139550 - DNA, 1144 bp, Homo sapiens
attgacaaattcttctccagaaatttgaccactttacactctggggtaagattcagactaagtgtgtctagaaagggtgatggggtcggctgggaggaggaactgggcttgcaggggacctggggcagtgagtgctctcagtgtgcaaaggggaactgggctgtcccaagcaggatgtgagggccacttgggccacattcaggcagaggggccctgctaaggcttgagtcccctgttcagagcagggaccatggtggaaattaaggacgttcatgtcaactgtggttgagattggagctgcagtcctagagtcagccctcttgggcccatcttggcagcaaatcaggaaggaagtagatctgtgtgctgaagagtcgccatggggcacgtcaagcccctggctgagccgtggtgtgctcacaggctgctgcactccccggggcagcggagtgccagggacttgtattttcatctttgtgctcctccgcctcctcagtgtggcgctctgagcacttcgattatttgaaaggaaatgcgaaaatttgtacaaaatctattgtgctagcacgtgatggaggaggggtctttgtgaacaggctttgagggtttgcttggctcacagctcactacccagtcaacagggttgactgccacggggtgacctcgctaaggtgaagcatgatgcccagcacgtggtcaggatggcacgggagcactggagaagatgagagtcgctgggaacctgggcgaggggggacaaggggcatttgagtgggcttcaggtacgtgaagtgttgcaagataaagtgggtttcttctggattgttccaaaggagggaggttgctctcaatgaaggaaacattcaatagtgagagttttccgataatgagctcagtcaacaatccccactctccccatactagagaagcaaagtggatttcttctggattgttccaaaggagagaagtttgcacttgatgaaggagacttttttttggggggggggtggggggtggatggagtctgactctgttgcccaggctggagtgcagtggtgcaatctcagctcactgcagcctccacctcccaggttcaagtgattctcctgcctcagcctctcaagtagctgagattacaggcgtg

SEQ ID NO: 139551 - DNA, 1550 bp, Homo sapiens
taatatgtgcgtggtccagaaaccggaggagcagtacaaagtgatgctgcaggtagggccgccggcgctgcggcgggggcgcggccctccgcggggaggagcgggccagtggggaggcccggagcggcgggcgtgggagagcgggagggctcgaggaggacaaggtagggagccgtccgcaccctcccatcctggggctgttgggtgttggcgctccgtgggaaccagccacgggtggggtgggaagttggggttggcccgggtggggcgcgcttccgtcccgggaggcgcggtgcggcgggcgcgggatggaggttgcatagcaacgagcgcagttccccgcacacgctctccccgcaggacccagggcgggggagggagccaggctcccgccgtgcggggggcgccgaatctagatcccggcgggcctggagcgtgggagtgcgtgggcgtccccgggcgcggtccaagtccgtccgggggctgggtgcccaccccgacacccactcccgcctggccctgcccgaacgatgggctcccgggccttaggcgtctcgggtgagtgggcgccgccgggatcagcgggttgggctctctgcgggtggcagtgcctggccgggctttgcggggcgtggaccagcagggccccgcggggagggaaggagacgcggggcccggagctcggacctggagcccagccccgcggcccggaacggggcttcttgcctgtgcgtggcgtgactacgtgagtgcgttcctgtgccccgtctctgtgtgcgcggaggctcccccggccccgcatttgtgtactttctgtgtgcaccctgcagactgtctagagaaatgtcccggatgctgtgggctgagacctcctagggctaagtggagggaggtcaaggtcaaggcacccaggagcagacagggctcagacaggtatgcgtttagtggcctggattcaactcccgggtttattggtctggactgggaaggaatcaagtgctttgcaggaggggtgttggcttgggagaacgtgggggaacccgtgcagggatcggcgagaactccggggcgggggcgggggcgggggaaggaggggctgggcacgggggagaattcccaggaatccggggactgacttcacgctgtgagccgagctcctctggccacctggtgcgggagccgaggggcagggcggggacgcaaatcttgccccaccctggcggagctcctggtcctctctccccggcccttctccgggggtgcgcggggccctcggcttctcccgttcgctgtcctccgccttcttccctctcagttcccggctgccactcctcgtctcttgttcccgctgtttggaaaccttgtgtggccattgccagccccctagcgggataggaatgcgaccgagagggcgtcctgtggaatccgtgttggattccagggctgggatggttggttgacggggactctggatcccatcctcctgcttccttttcgggagtcattccatcaaacggcaagcgatttctccaagcgattcctccggggcc

SEQ ID NO: 139552 - DNA, 1516 bp, Homo sapiens
ggtcaggagatcgagactatcctggctaacacggtgaaaccccatctctactaaaaatacaaaaattagccaggcgtgatggcgggtgcctgtggtcccagctactcgggaggctgaggcaggaggcagagcttgcagtgagctgagatcgcgccactgcactccagcctgggtgacagagcaagactctgttaaaaaaaaaaaaagacatttatggacattctaatattaaatcaccttgctttactgacattcgctgaacttggtcattattggctattttcctttatacacatttggatttggtttagaaaaatttttgtgagagtggggacgtccagcttcggagcgggaatcttcgctgcgccagcgactaaaaggagaattaaatatgggtgatgttgagaaaggcaagaagatttttattatgaagtgttcccagtgccacaccgttgaaaagggaggcaagcacaagactgggccaaatctccaaggcctcttcgggcggaagacaggtcaggccgctggatactcttacacggttgccagtaagaacaaaggcatcacctggggagaggatacactgatggagtatttggagaatcccaagaagcacatacctgaaacaaaaatgatctttgtcggcattaagaagaaggaagaaagggcagactcgatagcttttctcaaaaaagctactaatgagtaataattggccactgccttgtttattacaaaacagaaatgtctcatgacttttgtatgcataccatcctttaatagatctcatacaccagaattcagatcatgaatgactgacagaatattttgttgagcagtcctgatttaaaactaagactggtttgtggttaaatgaatacgttcagttcttgaattttaatagtaactccaattcagtaaatgctatcactgtttaccccttctaaagatatgattagacttcgttagtaatgttcaacttttcacaaagatggtgagtgccgtcttaaaacttactggagattggttttatatttagatttatatgactggttatgtgaatatatgtaaatactggggaaattccttcactgtcttagaaccaagcaagattcacctgtgttttgtgttcatttgcctcttaaaggcaacggttgaaggtaaataagggagcaatgtctatagttttggccttaactatgccaatctaattagaattccctgcattaaaaaaaaaaaagaaaaatttttgtttaggacttttgtctctgtattccagaccaaaatggacctacaatcttcctatcttgttctgtttttgcctagttaatattaaggttttgttgggtaatggtccttccttttcaattctctggcagagtctgtagagttgctagaacttgtctgtaaaaccatgcgggccggctgttttatttgtgggaagatttttaaaccgctgcttcaatctgttttatacttttagggttactagggctcgcttgcttgcttttttttt

SEQ ID NO: 139553 - DNA, 2020 bp, Homo sapiens
ggactcccttggtgccagaatgagccatttgttccttggccctcggtcctcgtggctctccaaaagaggctgcagcattgatgtgttaatactttcctttccagccccagagaagaaccctgtggatgtgaagggggaaggaaatgagaccaccaatatggtcatcacgtggaaggtgagagtccctgggctgagctgcctgggggacatgaggccatgacctgggtgtctgttgctcccccttggctatgcaaaggaaggggctgatgtctggggatgctggtttgtgctggggggcgggccaaagaatgctggtgttcttggccaaccaactcctcttctgctggcctcctccagccgctccggtggatggactggaacgccccccaggttcagtaccgcgtgcagtggcgccctcaggggacacgagggccctggcaggagcagattgtcagcgaccccttcctggtggtgtccaacacgtccaccttcgtgccctatgagatcaaagtccaggccgtcaacagccagggcaagggaccagagccccaggtcactatcggctactctggagaggactgtgagtatccggcagggcccctcgcccacggttgagctcgcctgcttccaccccagcccatgtccacacctctcagcattggtgtgcgcctttcctaaggatgaggatattctcttacataaccagagcgacgttatgaaattccccacacttcacatttctataattggcagcggtattccagttatatcagccaatgctgcttctttcatttccttgaatctggaacatgaccagatggtaacttgaagtacccggtcaagttttttttctggtttctcctttttttcttttcttttttcttttcttttcttttctttctttttttttttttttgagatggagtcttgctctgtcatccaggctggagtgcagtggagcggtcttggctcactgcaacctctgcctcccgggttcaagcgattctcctgcctcagcctcctgattagctgggattacaggcacgcgccaccacacccaactaattttcgtatttagtagagatgcggttgcaccatgttgatcaggttggtctcgaactccagacctcaaatgttccactcgcctctgtctcccaaagtgttgggaatacgggtgtgaaccatcacgcccagccatggtttctcctttgtataagctactattttcacctttgcaactaataagcagtccaggaagagatcttgagaccatgcaaacacacctctcctcctcaaactgtacctcataaaatatccgaattcgtcttctctgtgtgtaggggcttgggcctggcctcagggctggggtgagagcctatggctctatccaagtcactggtggtttccagacccccaggcaatccctgagctggaaggcattgaaatcctcaactcaagtgccgtgctggtcaagtggcggccggtggacctggcccaggtcaagggccacctccgcggatacaatgtaagggttgaaggcatgggggcccaggagggtgatcactgaggtaaagcgacaggatggtgagggggctttgccacctgccagccgctctcctggaagacttgggttgagaggagggtccccattaagggtggtgggggtgtgcgctgggggccctgctgggtgccttctgcccctgcgaggtctcctgttcgcttgtgcaggtgacgtactggagggagggcagtcagaggaagcacagcaagagacatatccacaaagaccatgtggtggtgcccgccaacaccaccagtgtcatcctcagtggcttgcggccctatagctcctaccacctggaggtgcaggcctttaacgggcgaggatcggggcccgccagcgagttcaccttcagcaccccagagggaggtgagtcctgcaccccacgcctcatcccctgccctcctccccagacctgggcgaggacctacctgccactcggttctgtgccctgcagtg

SEQ ID NO: 139554 - DNA, 1111 bp, Homo sapiens
ccagctcagggccctctgcagtgtccccagggagccccctcctccctccctggaccttcacactgaggtcttctgcagagacaaagctttcagaggcagcctgctgctccctccctccctcttctcccttcctcgaggccgccctggccagtgctctgcagagtcctggggctgggacagcagctctggcctctgccccagagagcttggtggctgtctgggaggaaggagggagaagaggagggctggcgccaaccccgcaggctatggaaactcagaggcagcagggcctttgggatagttttcagggggagggggcagcagggctctgaaggctgggccctggtaattgaaaacactcagctgtgctaattggattaggagggaagcaggctggagcaggggacggtgccttccaaggcatcctgaatgggtggggtcagttctgcaggccctgccaggccctgccagggggctgcaaggacactccttgttaaaggcaagaatttctctctccctgtctgctagagctggaggcatggcctggctgcctctgggctacatgccctgtgtgtctatccagtggagctcctctccctgggcatctctctgtcccatctccctgggcttgacctgccactgctccagcccagcgtgtgcccccttgttgccactgccagggcctcctctcctgccattccctctccacgggggggctgcaggagcttactatgtcccctgccatctgccccactctggggctgcctgtcagtatttctctccattccctcccttgctgcctgcctggatttctcagatgaaggacaccatggtaagttggggaggggtgagagtgtttcccagaaggccaaggagaagggtaaggaggccctcagctgagcctgcacccccgccctcctgagtgccggggccctgctcggctctccctgagcaccatgtgcttctctcacctgtgtggggctggctttgttctgtctctgccccagcctgggtactctgtcaccctcactgttcctctctgccattctctctggtcccttctcccctgtctggggtttgtccttcttggtttctgtgtcttggcttttgt

SEQ ID NO: 139555 - DNA, 1026 bp, Homo sapiens
agggaggagtggggcaggggccaagccaggcttcacgaacccctgtgagatccagggacacccccaccctcttcctcctgccccacctgcaactacctgtcctaggaagaggggctggggacctccgtgtgctcacgggctccctcccaccacacacaacctcacatgatacagccacacagccacaaacacacaacacagagacgctcgctcatgttcttgaacataccatgagtatggacgcaccttccctgtacctgagccctcctcctccctcccccaacacctctctccttcccctgtccccacaccccctccagcccccatcccagtagttctctttccactccccccgcacccaggcctggcttggctcagccgaggccagcccagcccagcccagcccaaggcagctgctttcttcctgtttgtctgtcttctctgttgcctgtgaagccagagaccaaaacagcctcacggaccaggcccaagtccggcccgcggccaaggcctcctcttcctgcccagagagcctggcagcaccctggcccctcccggccctgttagggtggtgggaacacagggtgggcattttccagagacagcgcacacaccacaccacatacatacatgcacacagccacacgccacacacacatgcacccaccacacacccatacgccacaccacacacacaccacaccatgcacacatatattacacaccacacacatgcacacatcacacactcccatacgccacacacccacacatgtacccaccacacagccatacacaccacatacgcacagccaacaccacacacgcacacacccgcagcacacacaggtgcacatcacaccccgcatctttgccatgtttttgcagagccccttgggggcaggctgcagagtgctggcaccccaggcctgacgcttcagctgcatctcctcagcgcatgcacatcctcatgctgtccccaataaccgcatgctgtcactaatctaggagcatagaaaaggcctt

SEQ ID NO: 139556 - DNA, 1041 bp, Homo sapiens
ccctggcacgcttgcattgtcttgagtagcggcaggccaagttcatggagcacaaactcaagtgcacaaaggcgcgcaacgagtacctgcttagcctggctagtgtcaacgctgctgtcagtaactactacctgcatgacgtcttggacctcatggacgtgagtccttggtgggcaggtgggaaaaggtgcctggtgcctcggggctgggaagctgtggctccaggacctacccaagcatctccttgtttcctcctcagtgctgtgacacagggttccacctggccctggggcaggtgctccggagctacacggccgctgagagccgcacccaagcctcccaagtgcagggcctgggcagcctggaagaagctgtggaggccctggatcctccaggggacaaagccaaggttctcgaggtgcatgctaccgtcttctgtcccccgctgcgctttgactaccacccccatgatggggatgaggtgagggtcaccccctgctgggcttggcattctctggccttcactgtaatggtgggcagtggagtggcatgacccacactttgctcaggaatccaagttctccatggtctcaggcagtgcggcagctagagaagtgtcccacttccatttgcagcctcactccaagggtgcacccccgcaatggccaaggagggcaagacactaactgttcaaaccgtgcagcaggcagccgtgtagctgcccatacattgttctaggctggtttctctgtgtttttaaatttcgtgacacaaacttggcagtaagatggaatggggcttctttatccttctccgtcgagctagtttttcctgcagcagtttatcctgatgggcattgtcaatgatctgggattacattgggcccctttcgggccgacttggaactttacgaagagtccggcatcaccagggcttccgatggcgtcacagctgctccctaacccacccctcccgttcccagctcccacccccagaaacagccacccacctcccggtgtcaagcagccattttccattggc

SEQ ID NO: 139557 - DNA, 1877 bp, Homo sapiens
ccagccgtggaggccgcctggggagcagccgggagcaccaaagcttccggtaggtgatgtgctggcaggggggccacggcagggcccaagctccgctcccaggtctcagtgcccctctacccccaggaaggagccgtccctcctgtcgcccttgcactgctgggcggtgctgctgcagcacacgcggcagcagagccgggagagcgcggccctgagtgaggtgctggccgggcccctggcccagcgcctgagtcacattgcagaggacgtggggcgcctggtcaagaaggtgaggctctcatcctgggccacgggaagtgttcgaggctttgggatcaggaggcactgtggctgggagggcactggaggccaggtggggagcaggcagagcgaacctgtgtgcccccccgatggggcttgatctgggcagagcttccagtgcctggcggggccgctctgggcagtgccgtgctcacccttgcctctgcctctagagcagggatctggagcagcagctgcaggatgagctcctggaggtggtctcagagctccagacggtgaggaaagggctggggaggggcctgccccaatggtccagggagaaatgccactcacagtggggaggaacaccgccagaccatcacatcaccccaagccaggctcagggagaagcacgcacctaggggcaaaggcctctctccctaggcacagggcgttaggctaagtgctcacatgggatcgcccagctctgaggtccaagttccagaggggcaggggtagagggctgggggctggcccagccgtggccttcaccagcaccaccttgctttgggtctccctgcaggccaagaagacgtaccaggcatatcacatggagagcgtgaatgccgaggccaagctccgggaggccgagcggcaggaggagaagcgggcaggccggagtgtccccaccaccaccgctggtgccactgaggcagggcccctccgcaagagctccctcaagaagggagggaggctggtggagaaggtgggcctggagggcacctcagacgcaggcctatgggccatgggccctaactaggacctgctgtgctgagggggaagtcagggctgggtgcaggggagggcaggagtggcaggacagtgccatcaggttccagggattccatacggaaggctcccagggcctgagagagtggggaaaacagttgcctggccctggacagccccatgcagcctctccatgctcccagcggggcccctgcagctctgctgttctgccagccattccgtaaggtttcagaggggggcaagaagacacttagggtgggtgatggggtgacacgcacggagaaagggccttcgaggtgagcccagtacagagagtggggaggctgggaaatgcctggatggagccgccaggctgtgcgtggctgacagtcatggtctctgggactctgggagcagaggagggagtcgagcatctcaggtgttcttaggggaaatgacagagtttggctgtgttgggggaaggtctccctggctgctgtggttagcgtgccagctttagccaggtgcggtgactcacgcctgtaatcctagcattttgggaggctgaggtgggtggatcacgaagtcaggagttcaagatcagtgtggccaacatggtgaaaccccatctctactaaaaatacaaaaattagccgggcatgatggcgggtgcctgtcatcccagctacttgggaggctgaggcgggagaatcacttgaacacagcaggcggaggttgcagtgatctaagattgcaccactgtactccagcctgggcgacagagcgagactctgtctcaaaaaaaaaaaataaaaaaaaaatagagt

SEQ ID NO: 139558 - DNA, 1100 bp, Homo sapiens
ctacgttgccaggagtcacgacctcagtttcctaggctgggctttagaggaggccatctgcctagcagcctggagggtgatgggagaggcagagggaggaggcttttagaagggaagtggggaggtctagggaccagtgggtggcctgcctgctcaaaggtagttctgagtcagggttctgcccaaggctcatcgggtggcagggctggtcaaggggcagcgctctgtcgtgggggcctccatggtagtcggtaagcccaggtagcggtggactggggctccagccaggtgtccccactcagtcccgcgtgtcctgcctagccctgctgcctcactatgcccctctcctcagccagcgacagggccaggctccctttgtctggaaacttaggccctgtctctttgcccccgcttctccctgggttcctggtggcagctgaggcggcacctggagctgaaagagaagggcaggcacgtggtgctgggtgccatcgagaacaaggtggagagcaaaggcaattcacctccgagctcaggagaggcctgtcgcgaggagaagggcctggctgccgaggatagtggtggggacagcaaggacctcagcgaggtcagcgagaccacagagagcacagatgtcaaggacagctcagaggcctccgactcagcctcctagagcctgccccatcccctcctcaccccacgagctttcacaataaattcgctccgtggcactggggaactttgtgtgtgagcgcgcgcacatttagagggtgtgtttctccaggtcctctggtggggatgtgagccttggccttttgacccagagcatcctgccaggcccgagtacaaggaaagagctttggaggtgggactccctagtctcatgaccttcagcagctgtggccccggggaaggaggccctggacttatgggagagaccctgccttggaggtctgcttggccacgctgaatgtgttttgtggcacaagccggggctgctcaggctcaaagctcaacagcagggctcccactcttggtggccttcagttctcttcccaccttcaccttcagactttctctccctaatcacacctgcttcg

SEQ ID NO: 139559 - DNA, 1018 bp, Homo sapiens
catcagggcacctgagaccggctgagttgccttccaggtcgggggtgggccggctgtggggaagaggctgtggaccccagcactgccaggatacctccacattcactcggcggctgatggttgaaaagccggcatggagacagcacctgcctgctgaaacgtgctccatgtgttgtgatggaggagctctggcccatgatggctgaggctggcgaagggcacacgggctgtttagtaatgtttgggaatagagaggtgtgggtccctggcgtgagcagatgctgaggagcaggactcaagcatgaccaagcacctagaagaatccaagagagagcagaatcgaggagaatgcacattcaggaaggaagggccagtggccaggcagcctagtggatgggggaggtctgcctgaggaccaggaggccccgtgtgcctagcacactagagagaacctggcagttggcatgcccagtagacagtggaaaaaagtgcttgcaagtgaagctggggtgggctgcctgtggagggacactaactgcactcagcccgtttggtaggggatgaagaagagggactgttgggaagggcggtggcctctgggctggatgctggcaagagggatctgtgacccagatgacgatgtctggtgggaattgctttatagctaagtcagcaatcctcatgtcttaggcctggcagggccagcctaggccattgagtccagctccccttccagggacatggccacgcgagtctgcacacacacctgcccagtgtagtcacggccccagagctgctcaggcagggctcaccgtctttcctgggttctgatggctgttgtgaggcagctcagtaagggacagggcgcagggcagggagggaaggggaaggctgaattcagggcttcagctcacaagaaaccgcagaaatggatccttagtatccaggctaaggacacagaacgggggcaggacgggtggggcgggccgctgtgtcctggagcctttgctggagagaa

SEQ ID NO: 139560 - DNA, 1432 bp, Homo sapiens
ggtgcctagccatgtgcgaggagatgctgggcgccctgctgagccgccccgcccccgccccctcccccgcccccacccccgcctgccgaggcgcggaataaaggctgagtccgctccacctgcggctgtgcgcgcgtctgtgggctcgcgggaggggggctgtcgcgccgagggaggggccggctccagctccggggcagcgcccgccccgcccccaggcccgccccgcgctgaccggctccgcgcattggcccgccccgtgcgctggcctgtcccgcgcattggccaagcggccgggaggacgggcccggcggccgtgcacttccggccggtggccggcccggcgcgcaccgccccttccgccgtcgcccagcgagcccagctccggtcccagccccggccgtcccggcgtcgcttcggagcgcggcggcagctgactgcgccttcacgatccgctgggacccgcgagccccgccgccgttatgaacatccgcaatgcgagggtgagcgcccggggcgggaggctgtccgcgccgcgtgggcgccgggccgggtggctgccgcgcatgctcccgagggccccggccgagcccggcccggtggccctgagtgtgcctgcggccgctggacctatggggctggcccagcccgccgaagaggccggggcgcggggccggggctgcgattccctcctgtttgcgtgatgtcgggcctccgttgggtgggctccggggacctccggggcgcccactcctgttcctgtgctccgggcgttgtgcaaagtcagatcgtcacagtgcctgcccagccccgagggagcggggccgagcagaccgacggggagcaggcttctcacccgtggtcaccgccgccttagactgagcgcgttccactgccctccttccctgcagccagaggacctaatgaacatgcagcactgcaacctcctctgcctgcccgagaactaccagatgaaatactacttctaccatggcctttcctggccccaggtgggcagcttctgaatttgggcatgggggaaagcaggccgaggaaaatcccatctggccatcttggagggagtggacaagtctgtcagagcccagggggctgtatggtcggtggcgtcctgggtgttttcagctggcagacaggggcaaaggaaaagaaggcgcccgaagggagcagagaataggggcaggatccccactttgcgtcttctttctgggtatgggcagggcacagtgtggcgagggggagaccaagccactcagcccggaggtcatgagccatcacacaactcgccactcgtccagtttgtgtccctctaaagggctcttctagctccgacaagaagttttctcactctgttttcctgtcaccagctctcttacattgctgaggacgagaatgggaagattgtggggtatgt

SEQ ID NO: 139561 - DNA, 1052 bp, Homo sapiens
tatggaggccaccagggagctggcgaaacgctgatgctcagacatatatgccattcgtctggggccctggtgtctattcaagaatctacaggtcaggaagctgatatcactgggaggggtccttcagaacttccaaagatgtcccgcaattcacctccagtagcttgggccaatggagacgcagccaggtctggaaagttgcggaggggagtttcctgctgagatgcctgcccctgctctcccctcagctggagtgggccatgaagctctggtggccacacagtgaagccatgattgccttcctcatgggttacagtgacagtggggaccctgtgctgctgcgcctcttctaccaagtggctgagtacaccttccgccaggtgagagctgcctccttgtcccctctagaggctgaatgggggaatggggggagtctggcccggctgcgctcttgccccctcgctgagcacagtcgctcagctggtctgagagtttccggagccccagtgctgttcgttcagtcaacgaagaagcctctgccctcctagagctcgaattttggtggtgggggcgggaggagcagagtgtaagcaagcagacctaggtggtggtgagagtgacagctgtgggaataataccactggagagggttgtgggggggctctttcctatggggtggcagcagggaagcactgagcaggggccgagtcaatcaggggtgtgtctgagggactgggagtctgggcagggtggggcatgtggcacagcaggggggcctggcagcccgggaggataaaggcagagtgggcaagggacggactccagctgcctggtctgattccattgttacctgggtcctggggcttggaggggagggtgttatgggggaagtctgtagggaacagggcagaagctgggacagcagaggaagctgtagctgtcatcccagccagtgagggctggcccaggtgggagctggtggggacagagggttcacagtctggtggagcagcagtgggattcctgagtctccagttcagacggagagatct

SEQ ID NO: 139562 - DNA, 3657 bp, Homo sapiens
gagcctggcaggtcaaggctgcagtgagctgcctgggcgacaggacactgtctcaaaaaacaaagaaacaaacaacaacaacaacaacaaaaacagaacttgcctcctgtctaccctgtgtggtgacaggtcagagggacctctgcattcaggcccactagctgttccctgtcctgctgcacccctgccccacaggcttggtagggccaaggccctcagccgccctgccggggcccctggtgtagggcggggtgggtggcagccccgttccccctcatcccagaccctccggccatcccagcttttcccaccaagcaggatcttgagaccagagctcccagcaggggccctggagggactggcccattcgagtggagggtcgcggcaggaacaagtgcgggggtcgggctcaaagccccgccccaggcccagcggaaccctgaagaggagggggagggtgagccgggcgcggctgtgtcagctgagtgacagtcacgggaccgcgaccaactctgtctggcttcctagaggagcaggagggatgagcaagggtctcccagcgcgacaggccagtggtggggtgcttggggggagtgctgtcttggagggtcccggggatggtgacgtctgaagccccgtgcagaggtggggagatccctgagggctggttcccgaggctgggggggcctaggtcccatgtgggggctgcgccttcaagccccatttcccctaggacatggagaaagagcgagagactctgcaggcctggaaggagcgcgtggggcaggagctggaccgcgtggtggctttctggatggagcactcccacgaccaggagcacgggtactcggcgtgcttctggagtcctcagcagggtttttgcccttcctgaggccccttctcactctcaggcacctcacagatttgctggccccagaggggcaggaggggctggcaaggcccgttccagactttgctaaccctgccttcccacaggggcttcttcacgtgccttggccgcgaggggcgggtgtatgatgacctcaagtatgtgtggctgcaggggaggcaggtatggtgttcccagcctggaagctcaggcacacggcccatcgcctcaaaggtctccccacctcaccccagccggccacttaagccactttccctcccgtaccccgcaggtatggatgtattgtcgcctgtaccgcactttcgagcgcttccgccatgctcagcttctggacgcagcaaaagcaggtaggtgcccccttcctgcccatctcccagtgactccgtccatgtttactcaacagggcacatgtgcggagttcctagagggatctagaagcagcgaaggacttggggaggctcaagggtggtgtgtgcggggcgtcctggccttacccctggcatgccaaccccccaacctccaggtggtgagttcttgctgcggtatgcccgggtggcacctcctggcaagaagtgtgcctttgtgctgactcgggacggccgcccggtcaaggtgcagcgaaccatcttcagtgagtgtttctacaccatggccatgaacgagctgtggagagccacaggggaagtgcggtaccaggtgtgtgagaggagggtgcccctgaagaccccaccctgcgaccctgccatggccacctgatgcattcccactcactacgcaagtcccctcccatggacccatctgtgggccaagtccccttcacctctgaacgctcccctacccccacaggggcgcagacggagagggccctatccacgccctgcccccaactgggaaaaggcccttccctcctccctgggctccctgtgctgccagaccctgaccccacagcctggaaggggctgcacccccagactgggagcagagtggggcggatctgactggcccctactggacgctgggtgccaggccccaagtaggccctggatgaaggtgtctctgggttcaggagaggaattggctctcccaccccagggccgtgtccagggggatggcacaggatgtagcctcagcctgggcctccccttgcctcctgcacccccagacggaagcggtggagatgatggatcagatcgtccactgggtgcaggaggacgcgtcgggactgggccggccccagctccagggggccccggctgcggagcccatggcggtgcccatgatgctactgaacctggtggagcagctcggggaggcagatgaggagctggcgggcaaatacgcagagctgggggactggtgcgcccggaggattctgcagcacgtgcaggtgggggatgcctggggagctggggtggtgggaggccttccactcccccactcccctgggcaccctggggctcgacacacctggagagacagagattcggggatgtcccacctggggaaggtggagggcctgagggctggagggaggatgcggagccccaggcaagccctgacagaaggagacccctcctgccccacccaagtcccttccaggcctctgggccgtgaaacccgccctgtctgtccccattcaatgtttcaccctcccctgctggagaggatcaggccagaagtgaggattacatcttcctaggcccgggctggacgcggtggctcgtgcctgtaatcccagcagtttgggaggctgaggcgggcggatcacctgaggtcaggagttggagaccagcctggccaatatagtgaaaccccgtctctactaaaaatacaaaaattagctgggcatggtggtgcatgcctgtaatcccagcctctagggaggctgaggcaggagaatcgcatgaacccaggaggtggagattgtagtgagtcgagattgcggccactgcactttagcctgggtgacagagcaagactctgtctaaaaaaaaaaaaaaaaaaaaaaaacaacaacttgctaggcccaagggagtgaatcagcccctccttaaatgcccctctgagcctggcccacccaagccagcaggtccaggggcttgggtaagagggagggaggaagggctttccggagctgggtctttctagttgggtggctgggtgggtgaaagggctggaggcaacattcccttctgctccttcccggtagagggatggacaagctgtgctggagaatgtgtcagagggtggcaaggaacttcctggctgcctggggagacagcagaacccaggtgaggggcggggtgggctgggggccacccaggaggaggggagcgctgagccttgtgttctgggcttcagatatgggagtgcctggcgggggcgccttgaggaggcagaggagcgaggatgggcttcccaaggctgggggtttctgcagaggagcaggcttccagggccagggagctcagagcctcgctcattgttagggagggagcagagaggtgccaggggcttttgctccctctgttccctccctcaaccccaccccccgccccccgcccttccgtactccacccctcaccaggccacacgctggaagccggctggtttctgctccgtcattgcattcggaaaggcgaccccgaacttcgagcccacgtgattgacaagttcctattgttgcccttccactccggatgggaccctgaccacggaggcctcttttacttccaggatgctgataa

SEQ ID NO: 139563 - DNA, 1061 bp, Homo sapiens
accgcctcccaaacagggctgctggtttccgcagccactgctccacctcccccaaatcgtcatggaaagggtggagaatggaggggaaccaggcgtccttggaggcagcttgggagggtgactgtgtagtgtcacccacaagggaggctagggcaatggagcaggccaccagcagcagctgtgcagcatggaactcaggccaggctccgaggctgggggatctgcttggagttttctgccccccaccccaaacttctgtcgaggagcaaggcttgccagcaagtcagaaggatttgaaccgagcagccaatctttccagccctcccctaccgacctctgcctggagacgcagcagcctgtgtcctccagggcctctggtttgttgtattatagtatatttcgctgtggaaaatgtcacgtttagtcaccttggagcccactcacctggtcctgttgttttaccccatcccttctctcgcgcgcctattgatttgtttctgaggagagtacaccgttcactattgtagagtaacccctgtgactcaatattaccatagtgcgatgtcgttttgtgctattttgaacaattaaaagactttttttgaaataaccactaggtgtctcactgtgtcccggcatcctctcaggaagcctgagcgggaaggctgagacctgcccgaggctcacgggagccccctggagggagacctgagctctggtgaaagcgtagaaggccccagagtgaggcctctgctgtggcctccggtctttggaccaagtcggaccagggtccagcaggttgcttggtagctgccttgcagggcaagggccaaagagccccttgggcagctgctgctgacttcctgtgtctggggcccagatctccctccctcccctcctgcactagaggataggatggggcaagggcctggcaggtcaccagcggcagcctccttgggtgggttggggggaggtgggctgagtcaagtacaccacgggtactgcagaggtggatcccttcctctggcttcctcttaaatgtgagccatgcccccaaggga

SEQ ID NO: 139564 - DNA, 1829 bp, Homo sapiens
cccacgggggtggccatcaagtagagcaggggacccagctccgggcctgggggtgcaggggacgccaccccaggatgtttgaggggacaagcagtgagagggctggcgggaaagtgtaggtttccaggcccgaaaacagcacgtcccaggtccctggagtgcagcaggtgagggatggaggccagcctgcctcctgtcaggtcatgctcctgctccagctcccctggggctctgggacctgggagggcagtgagaggtgggagctgagctgagtgggtttctaacctacgtccagaggggagtgagtggtgtcgtgttctggtcccaaggagtggcgtaaaaggtgaccacccatagggcaggcgccccacccttgccagctgcgggtcatgccatgtggcaccaagagactctgcaggcgggcagggcgcatgtgttccttgctctcgttctgtcacaatgctgctcacgcatctctcccgttccttccagaaaccagtaaagacagctctggcaccaagccagccaacaagcggcccatgtcctctccagaaatgtaagcaggaagcccctctcgggaaccttctgagactaggggtggaaatagctgggttcagcctcttgtcaaatgactgggggcccctaaccggccctgcaccagcagggcctccagtggtgcagggcccacactaactttctctttcctttttctgccttccaaggaaatctgctccaaagaaatctaaggccgatggtcagtgagaggaagctgactagcccctggattcttctccagacccccctgcttcaggaacacccgccagggcccacccctcccaccccgtcccagcattcgcacttcaccctcgcgagccgctgttcactcctctcccctttctctttctctctgtttttaaaataatctaaagaaagcacattttaccattgctgttgggaggaagcagaggcagatgggaaagcagagagaggagcgcgcttcctttcctccccgctgccgcccaccctggggagagacttttgcggggagggaaggcggagctgaggacagccagctccgccctcccaaggctgtgcgttcctgagggccaggtcgggggcaggcatggaggggaggaaaggcgtccctcttggccctccccagagtggctttcctggcaccctggcctgggtgtctggttctgttttcttttcttccccttgtgtttccagtcacctaacttcccttcctcaggctcccccggcccaccctgctcagtgaccccacaggaagcttacacattttctcagaggcctttgtgctcccacctcttctaccctccccctcttctttcccattttaaaaaagaaaagaaggaaaaagaaaaaaggggcaaggagccccgcggcggcctgggcagcgcctgtgcagacctccctgcaggccgcactgccaactgctgcatttgttgtgttttttaggttgcaattggtgaagttcacactttcattgtaattttagcgtgtggggttttgtcccttttttgttgttgttagctgtgtacagaatgtgtaatcttttttcttttctcttttttttgttttgttttgttttgtttttgtttttttacttttttcttcttggctaattcttggcagggatctttctggaggaaaagctggggccagccagggcaggagaggtgtgaaatctgccacgaggggcctgctgtttgccacccagcccaacttcctgttgctggcccctgccctctgcccttttgcctgtcctcaggccgctggaacaaaggaaggacagctcattcctcatg

SEQ ID NO: 139565 - DNA, 1028 bp, Homo sapiens
ccaccaccctgagcggggcttacaggaaactcctccatctttgggccaagctgagtagccaggaagcctgaggaaggtgggcagagaccatcccccctgaagcagtagaaaaggagagctttggttccttcccgccagtaccgggccacagtcagcctcgccacgtccctccttgccgtgaggggccagccaccgctgacctcttttccctctggcccatagttaccatggacctgcagtgttcctggggtggcccagagctgccttctccacagtggcgttcatgccactcctcttttcctaggatgatttgggcaccgtccctgactataaccagctgaagaagcaggagctgcagccaggcacagcctataagtttcgtgttgccggaatcaatgcctgtggccgggggcccttcagcgaaatctcagcctttaagacgtgcctgcctggtttcccaggggccccttgtgccattaaaatcagcaaagtgagtcttgctgtggggtggccgtctgtccctggttggtttctgcctgcctcagcacatgaggtggccgggggggggcataggagagctaggttttgagtcccagtttgtcttagtccttccacttgggggaagatctctttgaagctccttgaactaccacatggaatatctctactgtgttagaaaatggcttatgggaaccatgattagtcagttctggaagcctctagcctgttctgttgaccttctgaccccctggcttctagagtccggatggtgctcacctcacctgggagccaccctctgtgacctccggcaagattatcgagtactccgtgtacctggccatccagagctcacaggctgggggcgagctcaagagctccaccccggcccagctggccttcatgcgggtgtactgcgggcccagcccctcctgcctggtgcagtcctccagcctttccaacgcccacatcgactacaccaccaagcccgccatcatcttccgcatcgccgcccgcaatgagaagggcta

SEQ ID NO: 139566 - DNA, 1902 bp, Homo sapiens
ggagagcacccagggcgacagcgtgaacatcaccagctccagtgccatcacgacaaccgtgtcctccacactgacgcgggctgtgaccaccgtgacgcagtccacaccggtcccgggcccctctgtgccggtaagagcccagggggccgtgttcttccccgccttcccggcctacgcccgtgcagttccacactcagacgccagatgtcgctcttgtaccaggcatggggccgctcctggtcccttttccggaccataaaagggcagcctcggtgcctgctgcggcaggaggcaggagcctcaccgtcccccgcatctctggggcgcttttatttctgggactggttctcatcgcgtgtcacttcaccgcagcctgtataagacatggcgggggtctgagtgcccatttgtccaggccagggtgactgaggacgggttaaacctgaccgggggtctcaagggcctttctcctcatgctggtcagagaaccactgtcccctccctatttaacatgggctggagctggcccatcaagaatgaaaacttaggcccacaaggaaaggtgagggctggcttgcttctcagccctgctgcctggctctggcccctctcctcccctctgacaggggcttctctccctttctagaagatctcatcaatgactgagactgccccaagggctctgactactgaagtccccatcccggccaaaataacagtgaccatagccaacacagaaacttctgacatgcccttctctgctgttgacatcctgcagcccccagaggaactccaggtgtcgccaggtcctcgccagcagctgccgccacggcagcttctgcagtcggcttccacagccctgatgggggagtccgccgaggtcctgtcagcctcccagacccctgagctcccggccgccgtggatctgagcagcacaggggagccatcttcgggccaggagtctgccggctctgcggtggtggccactgtggtggtccagccacccccacccacacagtccgaagtagaccagttatcacttccccaagagctaatggccgaggcccaagctggcaccaccaccctcatggtaacggggctcacccccgaggagctggcagtgacggctgctgcagaagcagctgcccaggccgcagccacggaggaagcccaggccctggccatccaggcggtgctccaggccgcgcagcaggccgtcatgggtgagtgccggtgcaaccctggggaagccgggccgctcgggggagcaataggccgcggagacagcctgggaagaggagcccatttccctcgagggtggcatgagccagatgtgatggggaggacgagcacaggggaccccaggcaggccaagtagtagagactgccgtgtagaacaggctggctggggttagcgcctgggaaacaggcagggcccctcggccagggcttagcctacagtggagcacggtaggaggtggacggggtctctaggacaggctttgggggcctccgcccgggctgcccgcttctggccagccttcctagtaagtagtgtttctctcgaccctggagcaggcaccggcgagcccatggacacctccgaggcagcagcaaccgtgactcaggcggagctggggcacctgtcggccgagggtcaggagggccaggccaccaccatacccattgtgctgacacagcaggagctggctgccctggtgcagcagcagcagctgcaggaggcccaggcccagcagcagcatcaccacctccccactgaggccctggcccctgccgacagtctcaacgacccagccattgagagcaattgcctcaatgagctggccggcacggtccccagcactgtggcgctgctgccctcaacggccactgagagtaagc

SEQ ID NO: 139567 - DNA, 1047 bp, Homo sapiens
ggacaggcagacagccagctgcagcactaactctcctcctcgtgtgtctccccagcccgtgtcccagcccacccaggtaactctgatcacggcacctagtggggtggaggcccagcctgtgcatgacctccctgtgtccattctggcctccccgactacagaacagcccaccgccacagttaccatcgccgactcaggccagggtgatgtgcagcctggcactgtcaccttggtgtgctccaacccaccctgtgagacccacgagactggcaccaccaacacggccaccactactgttgtggctaaccttgggggacacccccagcccacccaagtgcagttcgtctgtgacagacaggaggcagctgcttctcttgtgacctcgactgtgggccagcagaatggtagcgtggtccgagtctgttcgaacccgccctgcgagacccacgagacgggcaccaccaacaccgccaccaccgccacctccaacatggccgggcagcatggctgctcaaacccaccctgcgagacccacgagacgggcaccaccaacactgccactacagccatgtcgagcgtcggcgccaaccaccagcgagatgcccgtcgggcctgtgcagctggcacccctgccgtgatccggatcagtgtggccactggggcgctggaggcagcccagggctctaagtcccagtgccaaacccgccagaccagcgcgaccagcaccaccatgactgtgatggccaccggggccccgtgctcggccggcccactccttgggccgagcatggcacgggagcccgggggccgcagccctgcttttgtgcagttggcccctctgagcagcaaagtcaggctgagcagcccaagcattaaggaccttcctgcggggcgccacagccatgcggtcagcaccgctgccatgacccgttccagcgtgggtgctggggagccccgcatggcacctgtgtgcgagagcctccagggtggctcgcccagcaccacagtgactgtgacagccctggaggcactgctgtgcccctcggc

SEQ ID NO: 139568 - DNA, 1056 bp, Homo sapiens
gccgctgacccaagtaggcatcacgctcctgccccaggctgcccccgcacccccgaccaccaccaccatccaggtcttgccaacggtgcctggcagctccatttctgtgcccaccgcagccaggactcaaggtgagccaggggaccagggacgtttgaaagtagggggctagcctccggggagaggcagcggccaagtaggggctgcgagacggcagcctagacagcaggccagcagccgggagctttgggcttgtctccaagggttgtagggggatgctaaagcctggccccacctgtggaaatggtcactctcagggcacagagaagagccagactcccacacaagcaggccaacagaagtggctcagggctgcctgcaaaggggctggggacatcgtgcagaaggtgatggctgacggctggccccttctctcatcaggtgtccctgctgttctcaaagtgaccggtcctcaggctacaacaggaactccattggtcaccatgcgacctgccagccaggctgggaaagcccctgtcaccgtgacctcccttcccgccggagtgcggatggttgtgccaacacagagtgcccagggaacggtgaggagtggtcactggggcgggtgggatttcctgttgatccagtggattaagttgcaagtgtactgaggggttcacatccctctcgggctctggtaccacgcaccccacacctttccctcctgggacgtgcagatggggaaacgctcctgcgaggtcatggtgggaattaataggttaatgcctagaaggcctaacctgctgcctgatcctaagagcatttgccacgtggactttcttgtcctgcagcctgagaggaggatctagccagctgggcttgccacaggcccatgagaatcaacgggacctgactctggtctttagaaaggatccagagctcccagctgcctcttgccacgggggttgccgtgcatggtgggtggtgggagccctctgtgtctggggccaggagagcggggtctggcagtagagaaagctgagccatgctggcggg

SEQ ID NO: 139569 - DNA, 2225 bp, Homo sapiens
gctcattaagatgaccttggcgagaagcagggtggtcacaggctcttttgcactggcctgaagtcgaggggtttggaagatggcccaggtagcgcagctggagttgctagagcgcccgcagggatggtgctggctcagcccctctcaccaagcttgacggctggcacatttggggaatgagaggaatgggggctcccgggtgttctgacttctgcctccttctgttccccagcaaccaaccagtggttcatcccagccgtgaggggggacattccccctgggtgtgcagcctatggcttcgtgtgtgacgggactcgcctcctggtgtttggtgggatggtggagtatgggaaatacagcaatgacctctacgaactccaggtaaagcagccccaggttctcactctgcctccttggccccatgtgacctgacggtagtggcttcagggttgaggcaagcgggaggtggaagggacgcttgagagtctgccaaggctgctctgaacttggcccacctcagaagaaggcagcaaggaccaacacccaggaccttcttgctccagcaaggcacctcgctcacccccggccatttcctcctccaccacaagttgccccgggtccctagtggtggccttctcatcccacggttcagtctccaggtcttgattttgcaggcgagccggtgggagtggaagagactcaaagcaaagacgcccaaaaacgggccccctccgtgtcctcgactcgggcacagcttctcccttgtgggcaacaaatgctacctgtttgggggtctggccaatgatagcgaggacccaaagaacaacattccaaggtgaggcttggtccttttctctggaaccccccgggtgggtgtgctctcacatgcacagggctccatggtgtcctaaagaatgtgcgcagcagagccccgtggccgggtccctttctcgtgctgggttgtaaatgagagagcggcaccggatgccctctcaggagctttcgggctccaaaatcgctactgaccctgagcaggcctcgtgggaggagggccaagctggaggtggaagccactttgccttgggctggcccagctctcggagtcggcttagagctgctcgcgttccttctcagcctccgctgcctacaagtttcctgatgggtattttccaaggcccgtggccaaggactctctgtctggaggtagtcccaagccagcgccccctcttgctctgcggagccctcatataatacccagctttgtgtgcatggcgggggcctgctgctgggtctggactcggggctgctgtgcagcctcacccaccctgtgtcccctgttccagttggactcatcctagggagcttctggcagccccttcctcaagagctagggtagaagaacttcagagctcccacagccctagcccctttgtgttctggggaggctgccactcactgatagccatccagcgaagcctctggcgtgaggagtcgagacttgccgtaactgatctttcctcgtcaggtacctgaatgacttatatatcctggaattacggccaggctctggagtggtagcctgggacattcccatcacttacggggtcctaccaccaccccgggagtcacatactgccgtggtctacaccgaaaaagacaataagaagtccaagctggtgatctacggcgggatgagtggctgcaggctgggggacctgtggaccctagatattggtgagcagggtggtagcaccccagcagccatgggacaaagcgggtctgcctcttggctggccccgtgggtggcgctgttgtatggtgaggtggggctcttagggagctggagcataccacttcgtgctttcctcttgtcatggtgggccagggtggggaaccctggatcgtccctaggtttggggctgttatctctgccctgtgctggctgagtgggctgaattggtctgcgggcttataagagaataagtcattaaggctttctagaatggaattctctggatccgggtagcattagtccctcttgactcgtcagtggtcagactgtgtggagtgctgcatcctggtctgactgctgtggtaccattggatgccggtaaaccgtgaggccttcggggactgcttgggccggtcaccaggtggtggtatcaggagtggctgggaaagattactaactgtggatctccggaggcctcttcagctgggagaga

SEQ ID NO: 139570 - DNA, 1907 bp, Homo sapiens
cattctctcctctgtccctgtatctaattgttcattgcgttgggcaggcatcaaatgtgtccccttccacaccaagccctcctctcctcttactagactcttgcagtcacttcctgattggccctgctagtttcatttgtcgggaaatcctgttcacccttcaaggcccggctgaaacgtcacctcttctgagaagccctttccactcctgtcctcccctctccagcagtcgcactgctctgtgctcccaagggcccggcttggtcagagctcttctagggtgtttgtctcatcgtgggaggggggcatgcagccttcctaccccattgggagtatgagcacaagatcggtgtcctctgtgcctcccagcacgtcgtatgccacacaggaaatgctctaatgtgacaggtagaacagagaggaaggcagctcgttgaacttgaccggccacctcactgcatgggcaccagtctctaggtggtgatgggacagtggcaaccagggatggagcttgcagagcatgaagtggttgggggagctgatgaaacacagagaggccggggcacagccttgctcaggagaggggagctggagtggtcttcatctagtgcagggtcctttccccaccttcccctcccagctgagagccagcatttccaggatgaggggcccaaggattgggttacatgacaccccccagatgattcaggggtgactgagagcagctgtcacattgaaaagctgggagaagggaggagagcttgctcgtgtgctttcagggggcggaaccaggactcgtgggtgagatgaggagccgcaggtttgtcgtcacaccaggagctgtgctccctgacagacctctcttgacgggggtggggagggcccctgccctgcctggagtgttctagaatgagatcagcacctcttgggtcctgtagaaggatctggtgagcgggatccccaaagatatcacagggcgcttctggcctggcccaccggctcactgatcagcgtgtgataggaaagctgcccactgaccccacgtgccatttagctttgtcccaaactctgacccgcagccccatagctgtgggctttgaccacgagggtgctcaggggagtgagggtggctgcctggacatgggaccctagggaaggcacagatcggttgcttcaagtcagtgatggggctgttgtctctgtctctgttttacgctgtgacctcaggtgtcgcttgccctcctgggctctgcccctttacctaccgagagcagttggcccaggcagccttaggtctcgttatgcgtttaccctggtagcttgcatggagctccctccagggattggtcaggacggctctccagtgcgcaaggctgttggccttggcagctcttgcttttctggggtggtttttgcactgggaatgagaaagaggcagagggccaggatccgagcttgcacatgcgggcggcacaggtgttgtccctctgctttagggaaatggcaggggagctctagtgctcggcatgtccgaggcccagtgactcagctgaatggctgcagaggctgtcagcctgctcgaagcctacccgcagagtgggtgctggagagcggggtgggggtgctctcgcctcaggaggagcggtggtggtacagttgtgctgtgtggggttttctgttttttttgtttgtttgtttgttttgaggttaggtcttgctctgttgcccaggccgggatgcagtggtgcggtctcagctcactgcagcctcaaactctgagggtcaggcagtcctcccgcctcagcctcctgagtagctaggaccacaagtgtatgccaccacactgagccagtgttttaaaattatttgtagagacggggtctccctgtgctacccaggctgggagt

SEQ ID NO: 139571 - DNA, 1613 bp, Homo sapiens
ccttctcctgcgcctgctcagctctccctcatctcgagtgcccattctggagaaatgaccatttctagattacagattcgttctctgtctctcgaaaaagggagggaagggaagcgctcttaggacgcagagtttaacatccgccgacccgggtaatgccggagccttggggacccctaggacgggccggcggcagggccgcctctccctttccacgtttacttctgcagcatttctttccaagtcgccccttctcctaatctggtgccttctggtttacaagctgaattccagttacccctcagcggcctgcgtagtcgtgtgtctccccgcttctgcggatccagggggttaccccacccgctcttctgcctccctgcaaaacccaaagcccgttagttgggaaggggaggaacctctctcttcaggtatggctgatgcaccacggccttcgtgggggccgtttgttgttgcctctgcctagtagccttgcttagtctctagggcagaaagcctgctgctgtccacgacagctttgtggcatcctttttcttggtggctacttggcccgttttgtgcccctagcacaagggtcagttcccaagttgcctactgactgcccgttggcccacaggaccctggccttgcccagaaggcagggtcagggtgagttcggtcccaggcaagagctggaagagtctgggtgagggaaaagccccctgcaggcggctgggggagggccttgggatgccctagtcctgagtggcaggcacggctcccagcactaaccccttgctccgcggccgttctctcctgggggctctagcgatcccctggcctcggtggtggccctgcagacaaaccctcgctgagtgggctttgtgtcctgagcggtgagaggctgctgttctttggctgagctccagtgcctcgatgctctgggggtgggaagctggagctgcctggagggagaaagttggtttagggagttgggaaggctggagctgggctcttgggtgccgcttccttccccaccccccaaggcagaaagtgctggtttctccacatctcggagattatcgccacctaccacgttgactttgaaaggctggtgggttgtctgtgaccgtttttcgttccaggtctctcagcacctgttgcctccagggagcagggcctttctcagcagcccccgggcgggggcgcttggtggttggtggtgccccgcgccagcccaggcagctgcagtagcaggaattagctcagtaagctaaggcttctccagtggtggggctgtttatagaggcaccgtcaccatgagcagcaccttctccactctgtggaccgactttcttctcataaggcctggagcaggctccctggcagggaaatgcaattttagaaagtagggcaggggcctaattacagtcggctccagagtccaccaccactgctgccttggcttcctggggcctctgcatattcattagtttattaaaatgaattgaccactttggcatgaattcattaccagtctgcaaagacaggttgtgcattagaggggtagcctgccttccaaagggctgcttaaaatgaagctctgggatcctcca

SEQ ID NO: 139572 - DNA, 2015 bp, Homo sapiens
atttccgagatgccgccgccgccatctttgttttgtgctgaaagtcgctattgacgcccgcggacggccgggcgaggggaagtggcaagatggcggctcccagggcggaggcgtggaggctcgcccggtgggggggccgtggggcggggcgcgcctgcgcctgcacctgatctgagcgcgactcgagctttagcccagcgcgcggcagcgccgacccccacccccgccgcgaggcagcgcaggggtcctttaagaggcttgggcccaggggcgaagcggtgcgagggcgagtggggggaagcggtgacgtcacccggctccgcctcctcgcccgaccgccggcgccgctgccgccatgtttagttgttacttcttcacacaagatggcggctcccagggaggaggcatgagcgccctgccgttaccgcttcttctgccgtacagttgccgcttcggggcctaactctagctctttgaagcggctcctgtgggaaggagtcataaggcgggaagtgaggatcggacaccgccttgagtttggtgtgcagtggaagaactgacctaggaggaagagaataggggggaacggggagctagtctcaagatggcggctcccacggcggcaggcgcagcctgagcagcagaggcggactaaggggagaggcgcgagacttcacaagccgtacggcgcgagcccccaaacggccctcgagagctcgagctggttccaccggcctccggcccgcctccattcgttaggtgtgtcgaggctgtttcgggagcggcggctgcactaaggcgctgggcggggaagcgggacggtctcaagatggcggctcccacaattgtggtctgagcgccggcggggctgcgacgaccgcggcgcttgtggctcctttccacccgccccggaagccggccagtgctggggacttgggggtgtgggaaccgggccggggctccgccatttccggcgggggagggctacgactgaggaagggaggagagagaggcggctcaagatggcggctcccagggcctcccgcccgagcttgtaagcgggagcgcccggacaagtagtcggggcgacgggactcagcggcctccagcttcttgagcctaggcgctcgacagtttcgggcggctcttgcggagacggggtgagcgagaagaaagggaagagccaaagggaaggagggcagttaagatggcggcctccatggagtcgtctaccgctgtgtgagaaaccgcttctccgtgagagctgccttagacgaaagggggtgtgtgaaaggaattgaggggctcccttcccgcttgttgacttctccccaccgcaccctttcccggaactatggcttcggccgtgtcgcccgccaacttgccagcggtgcttctgcagccccgctggaagcgagtggtgggctggtcgggtccggtgccacggccccgccacggccaccgcgccgtggccatcaaggagctcatcgtggtgtttggcggcggcaacgagggaatagtggacgaactgcacgtgtacaacacgggtgagtgcaaagcccgctgggtcttcggctctttccctccctccatctcctccctctccctcctctttcctccctccctccatctgctccctccctctcctccctccctccatctcctccctcaccctctacccttccctctctctctcccctcctcccttacccgtccttctcccctctccccgtccccctcccccttctcccctcctccccctccctccccactgatcggcttgcccctcccctttgctgtgccgggcttcagtgcttttctctgatcttctccccgttcccttgtctctcccgtgtttgaggattggttttcgttagttaaaagaaagcccctagtccgactggtgagggagaggggctgtcgccagcggtggtgacttcagacccacaccgttacccagcgggctggggctggggctggggcgggcggatgtgtccccttggcgcaggcagagc

SEQ ID NO: 139573 - DNA, 1578 bp, Homo sapiens
gaaagtcgagcagcacccacctccaacctcgggccagtgtcttcaggctttactggggacctgcgagctggcctaatgtggtggcctgcaagccaggccatccctgggcgccacagacgagctccgagccaggtcaggcttcggaggccacaagctcagcctcaggcccaggcactgattgtggcagaggggccactacccaaggtctagctaggcccaagacctagttacccagacagtgagaagcccctggaaggcagaaaagttgggagcatggcagacagggaagggaaacattttcagggaaaagacatgtatcacatgtcttcagaagcaagtcaggtttcatgtaaccgagtgtcctcttgcgtgtccaaaagtagcccagggctgtagcacaggcttcacagtgattttgtgttcagccgtgagtcacactacatgcccccgtgaagctgggcattggtgacgtccaggttgtccttgagtaataaaaacgtatgttgcaatctcgggctctacttgtggactttgttgcaccgaaagccttgagctttcctgatgccttacacttcagggttcttgagcgtccagggtcttgttactactctgggctggccacacccagcacttcccgtgtcaggtttttcctgatgtagtccatgttttttatgctattctaaatggtatctttgattttctagttcatcatgatattatacagaaatgcaattgatgctgggcacggtggctcacgcctgtgattccagcgctttgggaagctaaggcgggcagatcacttgaggccaggagtttgagaccagcctgggcaacatggcgaaaccccgtctctacaaaaagtacaaaaattagccaggcatggtggtgcatgcctgtagtttgagctactcaggaggctgacccaggaggatagtttgagcccaggacgttgaggctgcagtgagccatgattccaccactgcactccagcccgggcaacagagggagaccttgcctcaaaaaaaaaaaaaaaaaaaaaaaaagcggttgagttttgcatatgaaccgtatattctgtgaccttgtttaaattcttttttttttttctttttttgagatggagttttgctcttgttgcccaggctgcagtgcaatggcgctatctcagctcactgcaacctctgcctcctaggttcaagtgattctcctgcctcagcctcccgagtagctgggattacaggtgcccaccaccacacccggctaatttttttgtatttttaatagagacagggtttccacatgttgaccaggctggtctcgaactcctgacctccagtgatccgcccgcctcggcctcccaaagtgctagattacaggtgtgagccactgcacctgtccctggctgtctgtatatttacttttttttttgagatggagtttcgctcttgtcacccaggctgcagtgcaatggtgcgatctcggctcattgtaacctctgcctcccaggttcaggtgattctcctgcctcagtctcccgagtagctgggattacaggcgtccgctaccacgcccgactga

SEQ ID NO: 139574 - DNA, 1063 bp, Homo sapiens
gccccctgctgggcgcactgcactactgcatctgcctttttctgtcccctccctagtaccccacctcttctcctctggtgacagttgaaaatggagaggccccgtttgagggcagcggggcagtgagattcattttgtagaaaagaacgaggccattctcagtccttgcttttggcagccgcgcttctcagcactccctgtgatgggaacagaggggcgaggggcagagcgttcccagctgcagggtatgtcattttagagccctggggcaggtcacggacggcctggagcagccctgtggtttgcccacggggtgaccggccagggctgccatctcaccctgagagtccctcttttccacttgcaggtgtacgagaggctagagaagctgcaggcagtggtggcgggggtgcccgggcattcggaggccgccagctgcatccccccttccccgcaggagaactcctacgtgtccagcactggcagagcccacagtggggctgctccatggcagcccctggcagcgccatcaggagccagtgcccaggcagcagagcagctgcagagaggccccaaccagcccgtggagagtgacgagagcctaggcggcctctctgctgccctgcgctcctggcacttgactccaagctgccctctggacccagcacccctcagggaggccggctgtcctcagggggacacggcaggagaatcgagctgggggagtggcccaggatcccggcccacagccgtggaaggtagctggggagacgggttcccaggagagggaccaaggcctctttgggccaaagcccctgtaagtccccaccccagccttctagaagagaaccagggccaaatgttcagctcactgtgaccttagcaaccctggtttcccctccccaggccacatccttcccaggtggagcttgctctccagccctccccccaccccattcctgaaggctgggaacaaggagggctctgtctggtagcctgagagctgggccctgcccttggacttctctgaggaattcaggcctgaggccagggaggcagggtg

SEQ ID NO: 139575 - DNA, 1024 bp, Homo sapiens
cacctcccgggttcaggcgatcctcctgccgcagcctcccgagtagctgggactacaggcatgcaccaccacacctgcctaatttttgtatttttagtagagatgaggttttgccacattggccaggctagtctcgaactcctgaccccaggtggtctgcgcgcctcagcctcccaaagtgctgggattacaggcgtgagccaccacgcctggcccgacccaatgttttctatagagctctttcccaggcctctcccctttgcaagcagcgtagctggagggtctcatcagcaagccccggaggcgagggggtctggggctaccagctggaccacctacagctgagggagggcccccttgcctcctcctgcatgctgcgtttggggagagcgggaagaatgccttcaaggacttcccgaccaccagggacaaagggatgagccctgggagccgaagcccagcagattctattgaacgtgtccccagccattgcttaagaagtgcaggtcacggagactttgctcctcgttttccagaagggggaaactgaggcctagagagtgaagtggctgttccaggctgcacggtgacaggtagaaggatggttgggatcaaggaacggccatccagcaacctcccctgtccccctttgccaccccagacccaggcctgcccacctctctcctggcctcagcgactggacatccttctgggtacagcccgggcaattcagtttctacatcaggacagccccagcctcatccatggagacatcaagaggtgaggaggggcccttgagaactgccggggcagggcctgcagcaaggggggccccgcgtcctatcaatgtggggatcaggcatggcctgggacctcaacaccccggcatcgcacaggtgtgggaacgggccaaggatgggccctactgatgagcagaggcccccaggcagctggagcgctcagggcagtgccagcgctttctgtgggcaaggcaccgggctggcagcctcgagtccagccttat

SEQ ID NO: 139576 - DNA, 1051 bp, Homo sapiens
tctctgcctgcctctcactggtgtctttatgaagcttttccaggctcccagacccattcagggcctgagctcggcctggtcccaagccctgcttccctgtggcctccaccgccatctccagccccttcttctaccaaggtaggtgtcccctgccccccagggaagattcgagacaaggaggaaggaattcagcctttgatgtagcgcagagccccagtcagccaagctgggtcagctgggaggcagctgtggtggggagagcctggagccttgggcagaagggaagagacagggaccccacctgatccaggctctcttcccacagccaggcccagagagctcagtgtccctcctgcagggagcccgcccctttccgttttgctggcccctctgtgagatttcccggggcacccacaacttctcggaggagctcaagatcggggagggtggctttgggtgcgtgtaccgggcggtgatgaggaacacggtgtatgctgtgaagaggctgaaggaggtgagtgtcgcaccctggcagggaccctggaaggccatcagataaccctcaccacttctccagcctttccccctcgcttccccacacaactccttcagccctcattctggcgtagggtccctggccccttggtggttctgggcctcgggtaggtggcactggtggcccgaaggccttcgcttcgagagcctcacgctgcccgtcttccctgccccttcccccaccgcaccctgggggctgcagaacgctgacctggagtggactgcagtgaagcagagcttcctgaccgaggtggagcagctgtccaggtgaggccagagggggagccacaccaggtcccgtggggcttcagaccgcacaccacaggacctggctcccttgggcacctgaggcctggcaggcccgggcgagctgaggccccagccagggctgcccacccagtctggcctgatggaaagtgctcccctttttcaaacaggtttcgtcacccaaacattgtggactttgctggctactgtgctcagaacggcttctact

SEQ ID NO: 139577 - DNA, 1285 bp, Homo sapiens
aaacagccataggccctttcagtggccgggctacccgtgagcccttcggaggaccagggctggggcagcctctgggcccacatccggggccagctccggcgtgtgttcagtgttagcagtgggtcatgatgctctttcccacccagcctgggataggggcagaggaggcgaggaggccgttgccgctgatgtttggccgtgaacaggtgggtgtctgcgtgcgtccacgtgcgtgttttctgactgacatgaaatcgacgcccgagttagcctcacccggtgacctctagccctgcccggatggagcggggcccacccggttcagtgtttctggggagctggacagtggagtgcaaaaggcttgcagaacttgaagcctgctccttcccttgctaccacggcctcctttccgtttgatttgtcactgcttcaatcaataacagccgctccagagtcagtagtcaatgaatatatgaccaaatatcaccaggactgttactcaatgtgtgccgagcccttgcccatgctgggctcccgtgtatctggacactgtaacgtgtgctgtgtttgctccccttccccttccttctttgccctttacttgtctttctggggtttttctgtttgggtttggtttggtttttatttctccttttgtgttccaaacatgaggttctctctactggtcctcttaactgtggtgttgaggcttatatttgtgtaatttttggtgggtgaaaggaattttgctaagtaaatctcttctgtgtttgaactgaagtctgtattgtaactatgtttaaagtaattgttccagagacaaatatttctagacactttttctttacaaacaaaagcattcggagggagggggatggtgactgagatgagaggggagagctgaacagatgacccctgcccagatcagccagaagccacccaaagcagtggagcccaggagtcccactccaagccagcaagccgaatagctgatgtgttgccactttccaagtcactgcaaaaccaggttttgttccgcccagtggattcttgttttgcttcccctccccccgagattattaccaccatcccgtgcttttaaggaaaggcaagattgatgtttccttgaggggagccaggaggggatgtgtgtgtgcagagctgaagagctggggagaatggggctgggcccacccaagcaggaggctgggacgctctgctgtgggcacaggtcaggctaatgttggcagatgcagctcttcctggacaggccaggtggtgggca

SEQ ID NO: 139578 - DNA, 1055 bp, Homo sapiens
gttcaccagtgacctggaaggcccagcaccaccctccttcccactcttctcatcttgacagagcctgccccagcgctgacgtgtcaggaaaacacccagggaactaggaaggcacttctgcctgaggggcagcctgccttgcccactcctgctctgctcgcctcggatcagctgagccttctgagctggcctctcactgcctccccaaggccccctgcctgccctgtcaggaggcagaaggaagcaggtgtgagggcagtgcaaggagggagcacaacccccagctcccgctccgggctccgacttgtgcacaggcagagcccagaccctggaggaaatcctacctttgaattcaagaacatttggggaatttggaaatctctttgcccccaaacccccattctgtcctacctttaatcaggtcctgctcagcagtgagagcagatgaggtgaaaaggccaagaggtttggctcctgcccactgatagcccctctccccgcagtgtttgtgtgtcaagtggcaaagctgttcttcctggtgaccctgattatatccagtaacacatagactgtgcgcataggcctgctttgtctcctctatcctgggcttttgttttgctttttagttttgcttttagtttttctgtcccttttatttaacgcaccgactagacacacaaagcagttgaatttttatatatatatctgtatattgcacaattataaactcattttgcttgtggctccacacacacaaaaaaagacctgttaaaattatacctgttgcttaattacaatatttctgataaccatagcataggacaagggaaaataaaaaaagaaaaaaaagaaaaaaaaacgacaaatctgtctgctggtcacttcttctgtccaagcagattcgtggtcttttcctcgcttctttcaagggctttcctgtgccaggtgaaggaggctccaggcagcacccaggttttgcactcttgtttctcccgtgcttgtgaaagaggtcccaaggttctgggtgcaggagcgctcccttgacctgctgaagt

SEQ ID NO: 139579 - DNA, 1032 bp, Homo sapiens
gggcctctttcagtgaatttgtgaacagcagaattgaccgacagctttccagtacccatggggctaggtcattaaggccacatccacagtctcccccacccttgttccagttgttagttactacctcctctcctgacaatactgtatgtcgtcgagctccccccaggtctacccctcccggccctgcctgctggtgggcttgtcatagccagtgggattgccggtcttgacagctcagtgagctggagatacttggtcacagccaggcgctagcacagctcccttctgttgatgctgtattcccatatcaaaagacacaggggacacccagaaacgccacatcccccaatccatcagtgccaaactagccaacggccccagcttctcagctcgctggatggcggaagctgctactcgtgagcgccagtgcgggtgcagacaatcttctgttgggtggcatcattccaggcccgaagcatgaacagtgcacctgggacagggagcagccccaaattgtcacctgcttctctgcccagcttttcattgctgtgacagtgatggcgaaagagggtaataaccagacacaaactgccaagttgggtggagaaaggagtttctttagctgacagaatctctgaattttaaatcacttagtaagcggctcaagcccaggagggagcagagggatacgagcggagtcccctgcgcgggaccatctggaattggtttagcccaagtggagcctgacagccagaactctgtgtcccccgtctaaccacagctccttttccagagcattccagtcaggctctctgggctgactgggccaggggaggttacaggtaccagttctttaagaagatctttgggcatatacatttttagcctgtgtcattgccccaaatggattcctgtttcaagttcacacctgcagattctaggacctgtgtcctagacttcagggagtcagctgtttctagagttcctaccatggagtgggtctggaggacctgcccggtgggggggcagagc

SEQ ID NO: 139580 - DNA, 1052 bp, Homo sapiens
acgagccttttcacccttctactctagagaagtggactggaggagctgggcccgatttggtagttgaggaaagcacagaggcctcctgtggcctgccagtcatcgagtggcccaacaggggctccatgccagccgaccttgacctcactcagaagtccagagtctagcgtagtgcagcagggcagtagcggtaccaatgcagaactcccaagacccgagctgggaccagtacctgggtccccagcccttcctctgctcccccttttccctcggagttcttcttgaatggcaatgttttgcttttgctcgatgcagacagggggccagaacaccacacatttcactgtctgtctggtccatagctgtggtgtaggggcttagaggcatgggcttgctgtgggtttttaattgatcagttttcatgtgggatcccatctttttaacctctgttcaggaagtccttatctagctgcatatcttcatcatattggtatatccttttctgtgtttacagagatgtctcttatatctaaatctgtccaactgagaagtaccttatcaaagtagcaaatgagacagcagtcttatgcttccagaaacacccacaggcatgtcccatgtgagctgctgccatgaactgtcaagtgtgtgttgtcttgtgtatttcagttattgtccctggcttccttactatggtgtaatcatgaaggagtgaaacatcatagaaactgtctagcacttccttgccagtctttagtgatcaggaaccatagttgacagttccaatcagtagcttaagaaaaaaccgtgtttgtctcttctggaatggttagaagtgagggagtttgccccgttctgtttgtagagtctcatagttggactttctagcatatatgtgtccatttccttatgctgtaaaagcaagtcctgcaaccaaactcccatcagcccaatccctgatccctgatcccttccacctgctctgctgatgacccccccagcttcacttctgactcttccccaggaagggaaggggggtcagaagagagggt

SEQ ID NO: 139581 - DNA, 1723 bp, Homo sapiens
cctcccggcgagagcagaaaccacctaagaagcccaaatctcccaaagctccaggaactggcagaggccggggacgccccaaagggagcggcaccacgagacccaaggcggccacgtcagagggtgtgcaggtgaaaagggtcctggagaaaagtcctgggaagctccttgtcaagatgccttttcaaacttcgccagggggcaaggctgaggggggtggggccaccacatccacccaggtcatggtgatcaaacgccccggcaggaagcgaaaagctgaggccgaccctcaggccattcccaagaaacggggccgaaagccggggagtgtggtggcagccgctgccgccgaggccaaaaagaaagccgtgaaggagtcttctatccgatctgtgcaggagaccgtactccccatcaagaagcgcaagacccgggagacggtcagcatcgaggtcaaggaagtggtgaagcccctgctggtgtccaccctcggtgagaagagcgggaaaggactgaagacctgtaagagccctgggcggaaaagcaaggagagcagccccaaggggcgcagcagcagcgcctcctcaccccccaagaaggagcaccaccaccatcaccaccactcagagtccccaaaggcccccgtgccactgctcccacccctgcccccacctccacctgagcccgagagctccgaggaccccaccagcccccctgagccccaggacttgagcagcagcgtctgcaaagaggagaagatgcccagaggaggctcactggagagcgacggctgccccaaggagccagctaagactcagcccgcggttgccaccgccgccacggccgcagaaaagtacaaacaccgaggggagggagagcgcaaagacattgtttcatcctccatgccaaggccaaacagagaggagcctgtggacagccggacgcccgtgaccgagagagttagctgactttacacggagcggattgcaaagcaaaccaacaagaataaaggcagctgttgtctcttctccttatgggtagggctctgacaaagcttcccgattaactgaaataaaaaatatttttttttctttcagtaaacttagagtttcgtggcttcagggtgggagtagttggagcattggggatgtttttcttaccgacaagcacagtcaggttgaagacctaaccagggccagaagtagctttgcacttttctaaactaggctccttcaacaaggcttgctgcagatactactgaccagacaagctgttgaccaggcacctcccctcccgcccaaacctttcccccatgtggtcgttagagacagagcgacagagcagttgagaggacactcccgttttcggtgccatcagtgccccgtctacagctcccccagctccccccacctcccccactcccaaccacgttgggacagggaggtgtgaggcaggagagacagttggattctttagagaagatggatatgaccagtggctatggcctgtgcgatcccacccgtggtggctcaagtctggccccacaccagccccaatccaaaactggcaaggacgcttcacaggacaggaaagtggcacctgtctgctccagctctggcatggctaggaggggggagtcccttgaactactgggtgtagactggcctgaaccacaggagaggatggcccagggtgaggtggcatggtccattctcaagggacg

SEQ ID NO: 139582 - DNA, 1139 bp, Homo sapiens
ccttggctcctgctcagtctctgtttctccttttagccaaactctctaagagttctctccactcatgggccctcttccttgcctgctgctccttgctcagcttgctccatgaacacttgcttttccacattccatgaaataatcttaacagtcatcagtggctgtcactccttctcagccctttccttgtgtctcttctggtacctcatactctccaggtggccatctcacctcacatcttgaaccctctgggtttgggagaattctcacctcacgagttgatgggaggcctggcgacctctgattgtagtcactgcaaatgccagatgcttatttgcctagcttccctttcggtcagggcagcagttggcaaacggtatctcaagggccaagtccggcccactgcctgttttcgtaaatgaagctttaccaggacccagttccaccccgtcctttgtgcattgtccaagactgctctcctgtacaacagcaggtgggctggttgtgacagatactgtctggcccacaaggtggaaaatactatctggccccttacagaaagaaattacctgagttctacacgagggtgtaggtatgtaccctggcctctgccagtcagactcacatgctaggaggagcagggccaggcaggagagccgtgtctcctggcattggggctgcaggaaagacgagctcctaggccacagtgccagtggccagtgctgctgccttgcagggtcgcacaggcagtgctggctgtttggactggcttggcagaaggatttgaagtattgttcctagccaactggactcaaacctgttcctccaaccctctagggattctcttatcacccagtagccttttccccctagttttaaaaattgcagtaaaatacacaaaagataaaatgtactgccttaaccatttttaagtgtacaattctgtggtattgagcacatttatattgtgcaaccatcaccacatgcatcttcaatagcttttcatcagtccttgtctgcataaatcagctagagttggtttctattgattgccaccaataatcttgacagatatgtctgatcttccttctctgcactgactcctctttctctgtctcctctgctgattctttctcctc

SEQ ID NO: 139583 - DNA, 1114 bp, Homo sapiens
atttggggagcacagacaagtcaaggttgatgtgcatccgctgaacatgatcttaagttgttgaagtaggtattattaatgaacgaacgtctattttagctccaagagcccctggtcttccagaagagactcccaatgatcttccagaagcagctgggcttcttttggtcctcccccacccaggtgcagtcccgttctccctgcctgggtgagtttgattcctctgccgtggaataggctaggctgctacctcttgagcctcttccaccaggccatccattaggtggcgacagagagcactaaaaggaactactatggaaataaaacttgttttgcttcttggggggaaaaaaaaagaaaaaggcttgtggggcgtgtgtgcattttagtcagattttactgtgcaaaacatttgagagatttctgccctctttctcccttccattcttctcaacccactgggcgccctaccacccctgtctccttcaagataaggtagatcagaagaccaaatagacaaatgccatgtccactgttttctgtcacagttgatagccataccagtcacccaagctggaaacccaacaggcccctgcccttcactgcccacatccaagggagccaccaagtcccacaaattgttcctttaactgtttgtccctcttttgtcttctgtcatcccttctaccgctgtcctggttcaatccctcatcttgctctgggactcccatgataacttatgatctttcctccacctctctatcttccacacaatccctatcatcaatctcattcccctgctttaaacccaagagtggcaccctgtgtttgagtgacatcagggcccctcatgtggctcctgcttctctttgtggccccttctgttgctgctgcttttcttatggacatagccctcagcagtccaggactgcttgtagttcctcccaggtaccatgtttcttgcactcctggcctttgtcattggctcccctgcccaagtccccttctcttctcctttccttcccctgtggccttgccttgtcgtgcttatccttgaagaccctgtcaggtatctcttccccaaagagccctgcctaaccaccgcccccctccc

SEQ ID NO: 139584 - DNA, 1029 bp, Homo sapiens
gtaaacagcaactccaactcctgctcctcaggccagaaacctggcgctggttacctcatttgttcacaaatactgttactccacctgcaagatggatacaaaatctcatgagttcccctgcctccatggcccccaccctggtccaggtgtccagcttccctgcctctgcccttgccccctggttctttgtttagtcctgcaatattgtgctcttctgttcagaaccctccagtgggtccctgcttgctcagagtcacagcccaacaggatcacctctcttgccactctcccaccactcatgcactgcggcctcactggcctcctggctcctccctggaccctccaagtatgcccctgcctcaaggccttgacctctcctctgccctctgtcccaggtatcacacatgtctgctcaagtgtcaccttcccaatgtggccttccccgagcacacccatgtctgtaagtcaggcagcctgcctctgccccaccagttccccctgcctagcataggacttgtcaccatctgccacaagctgtgttactgcttggttttgtttgtgctctcccactcccttcccctccctccctctccccacccctatagaatctgagtcccatgaggacagagatttttttttttgcctcttcctcaatatatccccagtgcctagaatcatgcatattttaatttattgagtgaattaacaaataaattctgcagtgggacattgctctaaggttttgtcttataagagggacagaagaacatgcagcctgctctgctgttggctccttagcttctccatggctaacaggaacaatattgtttatgagataatcaaagccatagtcatgagttagaaggtacatataaaggcaaatatgtggagattgagttactttggcgggggcggaggggtgtgtagttatctgaaaacatggaacaaatcaatgagagtctaaatagcacccacatatttgcccctcttttaaaacatacctcctttatgagtgtagaatttaacagc

SEQ ID NO: 139585 - DNA, 1076 bp, Homo sapiens
cctataactcggtaataaaaagacaacctgatttttaaagggtgaaaatattttaatggatacttttttttttttttttgagacagagtctcactgtgtcacctaggctggagtgcagtggtgccatcatacatagctcactgcagactcgaactcctgggctcaagtggtcttcctgcctcagcctcctgcgtagctaggactacaagcacgtgccactatgcctggctaatttttaaattttttgtagacatgggctggtgtgtgtctgtgttgtctaggctggtcttgaactcctgggctcaagtgatcctcccacctctgccccccaaagtgctgggccaccacgcctggtgtggtgtcaccagagatgagccaccatgccctgcctgatacttttcttttatcatctgtttatttcttgtttatgggtgtttctgttctgattttatgactattctgtattctaagatttctctgagaatattatttgtttcctctaaggacagacttggtctctcttccatggggctggttcttgagccgccagggatggggggaggacctgggtagctgctgcgctgccccttctctgctgtggtggagtggcccgttgcctgcggggtctgtctctgaagggtggtttggagaagttctgtggaggcgaggcaggggtcagctcttgccccatggaccctcagagactgggaaaaggtaggcatcacctgggctgctgccagccacatcaagagcctttggggtgggtggggtgggggccggggaagggaaggttctagctgttgatttagaaaagacccattgatttcttgcctgagggaagaagtggcaccttgccactccaagtttgctctgctcaccagccccaacagcatcagcctcacctgggagcttattgaaggtgccctgccccaaagcttgtgggtcgggatctggcagtcagcagcccccaggtgttgcacacatgacagcactgcttgcccctcctctcgtctggtctggtctggtctggtctggtctggtctgagagcttctttggggctctgacaggtatacag

SEQ ID NO: 139586 - DNA, 1438 bp, Homo sapiens
agattacaaccatgagccatggagcccgacaagagtagccttttatttgcagaccattagagaaaaagttgcgtgtaagtagataagcatacgaatttatcactgcaatactgtttgtagagatcacagagctgttaggctaggaagaagtttttagcagttagcactagaaagcaaaactttggaaacttccatttcatcaaaagtgacctcatctgagtagggcatgtgagggaaggacctttttactcgacaaggggaacttgccagttcttgtttgtgaaccttgaagaaagtggagcatttttattttgggaccattctaggttgtggtagttccttggtactcggggttggagaatctccctctgctgctggaccttctgcctcctcatgctgtaatatgcataagaggtgtcctagaagtattcaggaacaggctgtggttgctttgttgttctgtgactgttgaactctttatatagcagtacttttttaagctgtactaattgagcatttattatgtgtcagttactgtgctagctgctggaaactatcctaccctcagcagtcttctggtctaatgggaggtacagacaggcaaatgggctatgactttacaagaggctaacttctgtgatggagagaagttccagccactaagggagcacataaaaatcagaggagatcctaccaagaattgggaggtaggtcagggaggagacttctttgaaaaatggcatctaagacctgaacagcaaggaaacattagctaggtcaaggacaaagcatcagtggggagagatgcatgagtcttttggaaggaccagcatgtgtagaggctctgacaggagagaatctctcaggcccattcagagagtccactgtgtgaagacgaggcatgaacaaccagccaggacatgtggagaggagcatttttctttttttcttttttctttcttttttttttttttttttttttgagacgtctttctctgtcacccaggctggagtgcaatggcatgatctcggctcactgcaacccccacttccagggttcaagcaattcttctgccttagcctcccaagcagctaggattacaggcacccgccaccatgcccggttaatttttgtatttttagtagagacggagtttcaccatgttggcctcaaactcctgaccttaggtgatccacccgtctcggcctcccagagtgctgggattacaggtgagagcccccacgcccggccaggctcggctttctttccaggccccgtcacactcttagatgttccctgggccccagaaggcagcgtgaggtgctctgcccatctatgctgtccttttccaccccaccctatccactgggcccctggggctcccactccactccaggtctcttcatggacccttctttcccttcacttctgtcccag

SEQ ID NO: 139587 - DNA, 2718 bp, Homo sapiens
ggccagcatagtatcagaaattagctaattcatatggggcagtttaggctttaactaggaaatgatggttatcttaatgacaaaaaaggtactgacaaaagtccttttttgaacatgtgttcaaaagaaaaagagaaactatcaaactaataactgagtttgttgaacatcgagattgactgatctgagaggcttaaaactgattgccctgaaatagacttgcatgttttggatgatggctttgggtctcccagagcacttggtttcccttggtgctgattttttctctcaggattaaagcccctttatgtgatgttgttacagcagcttattgcaacttcattcagctgcttgaaaaagaagggagactgcctctaggttccatgtgttctttcagggatggtattttgatgttgcgtattctcttgaacatgtattcttccctgagaatttctgtgtgccgtggtagaagaaatacttgccagaaatcgccactcatggtatgcttttgtagtgtcgaagtgtcccctagaggtgacaaggcttgtgatagtgttgattctaacaagcatgaatctttcctttattttagcactgtgtgttacgtgccagtaatttgcagcttatcctttgtttctagctaggtaagctgggaaatagcctagtactttgtctatgtgtttatcttcaaaatgtcccaaatagccctgggaaaaaggtcgtgcagctcaatgggggctttcaacttacaattttctttgttttaggctccataaaaatacagactcaccagttcctgctttgatgtgacatgtgactccccagaatacaccttgcttctgtagaccagctccaacaggattccatggtagctgggatgttagggctcaggtaagtaaccttcctttttttttttttagtatatgtcctggtttggccatctgttttttttttttttaaaaaaaaaaaaaaaaggaaaagaggaaaaaaatatactactcttggacagtataaaagtaccccaaagactaaagacataactgtgccaaactgtgccatataataaaaaaaagtcacttccctgagccctgaaaggtcagtgtgtgtagggttacttggtcgccacagcgtgatctgggggcgggcgtcagattagagccggaactggtgatctgcaacttcagttcaccttgaagcaggtcagctgagctgagagcgcttgcactgagcccttttgcgctgctgctgttgccttagcggtcttcagcatgtgtttgctttggtttggggtaaatggcttagtggtcaacattagtgagcagtggtaatgcattttcagatatgggaactggtatgtggttggttccctagaaggacaccctcctgaaagctgtctcagaacaccgggggccatggctaatgtcatgtgcttgctacactcctcccatggtaactaaagagagtacccagatatacatctggttcttgggactctagaggaggatgagtactttgtaaaaacctgggggccccagtcattctaggtctgacactcaggtgctgtatcagctgcagtttgaactacttggcaccattgtgtggactttagttttgtaaaaatgaatggttccttaatttctcaaccttcaggctcaacatctcaagctgtttgttgttgttgttgttgttgttgttttgttttgtctttttgattagtggtcactccgcatttgatgttttgacatgtggatttcagaacttctgtgtggtaaagcagaatgttccaattgaattttcccattttttttcccctaagcaaaaatgtgagttttcacttatgcggccattgtgattccgactgagaccctaagtcgttctttgttgtctctctagtggtttctgacacctcagtgtgaagctgttgtagacatccataagaaatagcctgcttagggattatgtgagggcaaggtttggctgaaggagaatagaaggtgtggaaggaagcggaagaccagaagagcatcacactgcctcaagtcccaaatttgattctgctcctgatcctgtgactcaaattgtcattctcttttactgctgtggggtgtgctctgggcccagctgacaggacattctttgtactccacgtatttatgctggtgggagttgtatggctagtgctttgtgctttgtctcagaaattgtgtggactaaatgtaatatgggcagtgaatgggtttcttctggaagatgttaggcctggagggtggtttgggtttttacgagtctttttctcagattacagattacgaatggatgttataaaacaggcagtgttgacaccatacagtttctcctaagaaatgtacagagagttcaacctgaggaagctaattgaaaataaacttttaaaaagaaatgtagaaagaggaaatttaaaaagtatcttatgaatgggaaagatgtagccatttgagcttcaaagaacttttgagggaattctcaaaggacagtacccgtctttagtagataaatgcttgatatctatttttcttcttttactttttaaagaattactaaaataatacatggatttatagaaaaatcaaaccacttaaaaattgatcaggtggctgggcaaggtggctcatgcctgtaatcacagcgctttgggaggcctaggcgggtggatcacctgaagtcaggagttcgagacca

SEQ ID NO: 139588 - DNA, 1737 bp, Homo sapiens
tgtttcacccgattgataggagagtgtcatgcagtcagccgaactccgacttctgtgctgtttaaatccttaggtaggtctggggcaaggcacaaaccactgtgtattcaaagggttatggtgcttgcattctgtgtgtatatgtttgtaatttccaaccagagtcgtttcccgtgcctgccctgcctctgtgcaatctagtctagtagggtagggaggcaagctgtggagtttgaaaaaaaaaaaaaaagctagatgagtttaataggctgttaccccctccagaacattcctcccatgtggagatgaaacgagaagttcatttctttaacctaaaataaagaacaacagagataaaattgttagttccttattggagcctggtttccattgctaatgtacctgcttgggactctgcatgataaatgacgtgtcctggaacctgaaatcttttataaaggttaatatcagcagaaatcttttaattagctaagagcagcttgttctcaagctgcccgagttatcttggaggagagaatcacaggaaatgtttgatatttctagtaaccagtgttttcagtgcgtggggtaaagcacactcctagactggccagtcccaaagagtgtggcaggacacctgcttgttttccctgccctctgctatggtgacatccttgcagaccagtcttgcgtggctggcagacgcaatctttttttcttgggtagagcattatcaccgctgcgatggaaggaccttgtcctcggtgcctccataccagccctttccagtgaaactactgctgtcccggcaagcccctgtgcgtgtgcatcattccgggtaggacaagatgtgaacaggtccctcttctttgggcttaagtagaagttgtgctcttctgcttttacctgtgtgctcttctgcttttacctgttctcttctgcctttctcttgcaagaaacctgtcgaaagcttgctttgcatgccattgcttaaatactttgatggtatgtatggtatgtgggataactgagtgggagccggaattggggggtgggcagggcatccccacccccacccccacatcaaagggggaatgaccatttcgttagagaataaagcctgagtcttataacttcttcaagcacatgtatgctgggtctcctggcgtgtgaatgtgttcccgctgtgctgtgtggctgttttgcagttactgtagacactgtagtctgggctctcattattgcctctgaagttgacaggaccaagccttagtaaggatgcacttgtcttcctagcccaagagctaggggtgttttatatatatattaactttcttttttagatttcataaactgctctcattttctcttttctttctttctttttttttttttttttttgagacagtctcactctgtcacccatgctggagtgcagtggcacgatctcagctcactgcaacctctgcctcccgggctcaagcagttctctgcctcagcctcccaagtagctgggattacaggcacctgccaccacgcctggctaatttttgtattttttttttttttttttttttttttttagtcgagacggggtttcaccatcttggccacgctggtcttgaactcctgacctcgtgatccacccgcttcagcctcccaaagtgcagggattacaggcgtgagccaccgcacccagcctctggctcttttctttttgacatgaaatcttaagtt

SEQ ID NO: 139589 - DNA, 1688 bp, Homo sapiens
gcgcgcgtgcgcacttcgcctcccgtcgggagagtgcgccacaagggctcctgagctctcacccccatctctgggctttgcctccccctccttctcgcccattccatgaatttctgccccccgctacccccccgcgagcgagtaggtccaccggctcctttccccatctagcaggaacaagtaggtggggattattatccacaaaagggactagacattgtgttctgggtcccacaactcatcataaagaggtggttatagttcccatcaggagccgtgggtaggggactgtgcgtccagcagcacccgaggctcttcggcgccagaggctctaaggtgcgagcgtgtccccagggtgctcagaggttctttggagtgctgtggcctcggaatgtgagcaccctcccatcctaccctccccttcgccggcgatcttccagttacataagtggagtgggacatagtaggtaacgggctctcatcgccctggagcgctcgggatcaccggtaccagatggggcaagttcatcgcgacgctgtggctcctgttaattgtgcctgaaaggttatcctctgttcagtttggtcatgaccgaatcacccaaactgaaactcagatgacttttatatggcagtggcaatgtttctgtggttttgcactaaagacttaaggtcattatgaagagtgtaaaaggattgctgtcgcaggggagaccgtttatgacattgctaagtatggaccccgagggggaaaaagctcattctggaattgctctgtggcggttgcttctgttgcgagtgtgttcgggtgtgggttggtcacagcagaaatgggctccaccacaaaattgatattcctgactcatggtcaggcagatgtgtgcttctggttatttttccaggaacaggaatgggctctgccgagcctttcacacgttgtgtctctgctgtgcgggatcagtaccccagactgtgagataacaggatcgaattcaggggttggttggtgatccaggaaccatacctacttggatgtgatactgagtggcctagacgttgtaggactctcataagttttagacattttgttatactgtaaaaatgaagcatatacggcctcagtagtaacattgcactaataggtaattattactctagagaattttgggttccatggctggaatgttcatcagtatctcagcaatttcagttaataaccagattaagctgacctcttgagtcttttgaaatctgctgggtccctataataagacagggtctggattttttaatcttttgggaatttccaccaaggatttagggaaataggcttttatgggcttttcaggatttctatttcaaatcccaatgaggaagtctaggaaacacttgcttttattttcttgcctgaatatgtcagaaccttaaatcacccaatcaatctagaagtactacagttgattaaagtaagtcaccacaggtcacccattcgtggcaggtcagctaggtggctgatcactggaatacagtcatatccccaggcatacacacgagcctcacttgacgatcccaaagtttgtacatctgagcttgagacgtgacaagttgaggtctctgctttgttcttcatagttggcagtttgtctcctcgggtgcccctccggttagctgtttatcatacgtctagc

SEQ ID NO: 139590 - DNA, 1932 bp, Homo sapiens
tgcggctgcacgtgtgcacacagctgctaggcccttgcctccaagctcttggtgacaacaggaggcacctggaggtgacaagcctgtgctgggtggccgaggacagggaggcaggccagtctggctctgcctgacctcctgtgctcccagggaacccagctgagttcgtcgtgaacacgagcaatgcgggagctggtgccctgtcggtgaccattgacggcccctccaaggtgaagatggattgccaggagtgccctgagggctaccgcgtcacctatacccccatggcacctggcagctacctcatctccatcaagtacggcggcccctaccacattgggggcagccccttcaaggccaaagtcacaggtgagcctggggccaagctattggcatctgcccaacgcccggcaccacagccacctcttagccccacccactctgccttgcaggcccccgtctcgtcagcaaccacagcctccacgagacatcatcagtgtttgtagactctctgaccaaggccacctgtgccccccagcatggggccccgggtcctgggcctgctgacgccagcaaggtggtggccaagggcctggggctgagcaaggcctacgtaggccagaagagcagcttcacagtagactgcagcaaagcaggtgggcaacccgggcccccggcccaccttcccaccaaaatgaggccagaaatcacaggatggccagtgtctgggagagcagggaccgcctttggggcgtggctttcacttctagagccacctccctgccacctcctggacccctcaaacaaagaccagggaggagctggaatctgctaagctggcctgggttggggaggtgctggcagctctttaggaagagagaactgtcaccccagaactggcttagggacaggagaggagagcaggacaccagcgggaggaagggggctgggacctgggactgaggacccctcttgcctcaggcaacaacatgctgctggtgggggttcatggcccaaggaccccctgcgaggagatcctggtgaagcacgtgggcagccggctctacagcgtgtcctacctgctcaaggacaagggggagtacacactggtggtcaaatggggggacgagcacatcccaggcagcccctaccgcgttgtggtgccctgagtctggggcccgtgccagccggcagcccccaagcctgccccgctacccaagcagccccgccctcttcccctcaaccccggcccaggccgccctggccgcccgcctgtcactgcagccgcccctgccctgtgccgtgctgcgctcacctgcctccccagccagccgctgacctctcggctttcacttgggcagagggagccatttggtggcgctgcttgtcttctttggttctgggaggggtgagggatgggggtcctgtacacaaccacccactagttctcttctccagccaagaggaataaagttttgcttccattctcctttgcgtggctgtagctttgttggggttgggggaccagtcaaggccaacctgacaggggtgccaatgagcagatcaaagcatgggctgagcacaggtcacctccctccagggctcctgcttcaccccaccctgactccagaaggcaccatctatctttgcttcctctgcctccctgagttcaagccaacgtaaggagaggaacatgtagcaacctggaatggagcccaggcagcaaggaggcaaagagctgggcaggagagcccattactgggtagggtggtgtcaggaaggctccctggtggaggtggccagataatcaacagcaggcccggccgggtgtggtggctcacgcctgtaatcccagcacttcgggaggccgaggcaggcagatcacaaggtcaggagatcaagaccatcctggctaacacggtgaaaccccgt

SEQ ID NO: 139591 - DNA, 6210 bp, Homo sapiens
agacccccatccccaccttccaggggcctctgcgtcccgggccgggggaggtgcatgagcgggtggggctggctggtagtgcagtagcgccagtgtcgactgcttgggcggccagcatggcggggcccggcccagcctcagagccccaaagtgcattctgtggcccgtctccctccttcccccttcccctatcccccagcagtgacgttattcagacattccccaacaggcatggagggtcacctgccccagccagggacacccagggatgctgatgagaggctacaggcctggcacttgggcgaggtggctaaggaaagggtgagagggtggctagagttttgcggcaggagcgagatggctttatagagcaggccgtaggatccgatgtgtgtgtgacaggcgtgtgtgcgcagggcgggggaggctggggagtactgattgcagggccttgggggctttgagggtgggagcaagactcagtaacctcagtttccctggctactgtttgcagaatggagacagggagcccggggtggggaagggggcgctgaagttgctctctggcaagcttgacggccacggggcttcagtgagagccaaattaggaggcatactttgaggatggagtggctgagacctgcggttggctgggagccgggcagggaaagtgggggcagtcgggtacctgtgaggttggggcccaagccactaactagatggcatggggtgcacatgagtgaagcctcccagggcagcgtgggcagccggcagccaggtctggagcctgggagagctgcctggccgcggcaggccagcatggagcctagtgcagcaggagccctcggccgatagtgggacttggtggcagggcccctcgagcttggccttcaagtaggtttcgtgctcctggctgcttccctggcaggaggccaggctgcagggggcactctcactgccaggcctcacagcccacagccccccaagcctccacggcggagacccagatcataacgtcactgtctctcccctttcctcgggcactctggggccctggagcctgctcagctgctctgccctcgcaacccagcagtggtggctgtagcttgggcctcctgttccctgtctccctgggtgctatccccgctctgccaagcctgctgcgctgcgctactcgggtgctaaccccgctgcctcccgcttccccgctcccactcctgtctgcaccgggctgcttttcaccgcgagccttctcagttgtcaggaaactccggtttcaccatcaggcctggggggtggggaggcaagtgtcacatccccccacgctgcagcaggactccgcctcaccgcgtccacacacagcaatgggggccggggccaggccagaagggcgcaggcagccgtgtgcccagccagatgctggcgttcagcagtgtgggccatggtgctggacgaggctgagtaggcaagggagtggctgtcaacacttaggctggagtgggcccttccttttcctcccaggcacctgggtgctactgtcgggcctctcccacatgggcacttgaggtggtcaggagaaaccttcctgccttctgagaaaccactcgccatcccagcttggaggggcagggcggggcaggaggcctggcggcctggctgtgcttggtggtggcaatgagaggcctgtgtgggcggcaggcggacgggaacaacctgaacccgagctcacacgctggcccccctttggggacccaccctgccccaccaggtgctggcatcggccccaccattcagattggggaggagacggtgatcactgtggacactaaggcggcaggcaaaggcaaagtgacgtgcaccgtgtgcacgcctgatggctcagaggtggatgtggacgtggtggagaatgaggacggcactttcgacatcttctacacggccccccagccgggcaaatacgtcatctgtgtgcgctttggtggcgagcacgtgcccaacagccccttccaagtgacggtgaggaggggtggggggtaggtcagcaggggtgtctggcaggtcccggcctgttcccctggggcccctctgtgacaacagactctccagcagctctctgctttgccctgcaggctctggctggggaccagccctcggtgcagccccctctacggtctcagcagctggccccacagtacacctacgcccagggcggccagcagacttgggtacggcctggccagctagggacactggggctagccagctgggtgttctgtgagcccctagtttaccatgtgtgaggagggaccccagatcctcccactgtccctcacccatgccctgtgtctccactgcaggccccggagaggcccctggtgggtgtcaatgggctggatgtgaccagcctgaggccctttgaccttgtcatccccttcaccatcaagaagggcgagatcacaggtgagtggggacttgggaaggagctcgggagccaaggaggccagactgtgccaatgagctgccctgacctcagccccactgccccacaggggaggttcggatgccctcaggcaaggtggcgcagcccaccatcactgacaacaaagacggcaccgtgaccgtgcggtatgcacccagcgaggctggcctgcacgagatggacatccgctatgacaacatgcacatcccaggtgggcctgccctgcctctgcccactccaccgccaccacctcacagagagatggggctgggggacacacgaggctgccattccacaaggcccttcttcctgcctcaggaagccccttgcagttctatgtggattacgtcaactgtggccatgtcactgcctatgggcctggcctcacccatggagtagtgaacaagcctgccaccttcaccgtcaacaccaaggatgcaggagagggtgagcaatagctctggtcttgacctgctctgtgcccgggatgccctcaccggggtaagggctggactcaggagatactcctgaatggggctccctgccctgctgccctggccatcggagctcctcagtgcaggccaactggagtgtccccagcatagttcccatgctcacccacggctctctccagggggcctgtctctggccattgagggcccgtccaaagcagaaatcagctgcactgacaaccaggatgggacatgcagcgtgtcctacctgcctgtgctgccgggggactacagcattctagtcaagtacaatgaacagcacgtcccaggcagccccttcactgctcgggtcacaggtgggtggcactgggagcagtgacagaaacgggtggcagggtgggcatggtctcccatggctggacgcacactgatggctggcctgtccccaccaggtgacgactccatgcgtatgtcccacctaaaggtcggctctgctgccgacatccccatcaacatctcagagacggatctcagcctgctgacggccactgtggtcccgccctcgggccgggaggagccctgtttgctgaagcggctgcgtaatggccacgtgggtaagcggctgaagggtccagggggttcagaaaggaggcagcctgtggggagccatgccctccctgactgacagccatgccctgtgtccagggatttcattcgtgcccaaggagacgggggagcacctggtgcatgtgaagaaaaatggccagcacgtggccagcagccccatcccggtggtgatcagccagtcggaaattggggatgccagtcgtgttcgggtctctggtcagggccttcacgaaggccacacctttgagcctgcagagtttatcattgatacccgcgatgcaggtaggcagtggctgcccaccagctggggcgggagcactgtgcatagcaccgaggctcaggggtatccatcccctaggctatggtgggctcagcctgtccattgagggccccagcaaggtggacatcaacacagaggacctggaggacgggacgtgcagggtcacctactgccccacagagccaggcaactacatcatcaacatcaagtttgccgaccagcacgtgcctggtgagtgcagcagtgcctcggcagcccccctcactacaccagggcccacaggcagtatgtgactggaggggcgtgggccgtgctttcttcctgcaggcagccccttctctgtgaaggtgacaggcgagggccgggtgaaagagagcatcacccgcaggcgtcgggctccttcagtggccaacgttggtagtcattgtgacctcagcctgaaaatccctggtaggggctgtgggaagcctggggaggggtcctggggctcaagcagccccaagaggaggggtggagcccagggctgctgctcactagcccatccccaccctgcagaaattagcatccaggatatgacagcccaggtgaccagcccatcgggcaagacccatgaggccgagatcgtggaaggggagaaccacacctactgcatccgctttgttcccgctgagatgggcacacacacagtcagcgtgaagtacaagggccagcacgtgcctgggagccccttccagttcaccgtggggcccctaggggaagggggagcccacaaggtccgagctgggggccctggcctggagagagctgaagctggagtgccaggtaggcctgctcacaccccgagtgctcgctctcctgcgttggccagggtggggttgggggtggaggaaagagccggcaggcatgtctaccttggctatgcctggagggggccgaggctggtgaagcagccttcagtgaggacaaactgttctcccacagccgaattcagtatctggacccgggaagctggtgctggaggcctggccattgctgtcgagggccccagcaaggctgagatctcttttgaggaccgcaaggacggctcctgtggtgtggcttatgtggtccaggagccaggtactgggaacccggctggggttggaggaggtggggcctgagtgtgggtattggacccagggctggcacagatagccctgcctggcactcactcttcactttgaggtcacagggccacccaggctgttcgtgggaggtgggaggcccaaaggctgatgagccggtcttacactctttccctgcccaggtgactacgaagtctcagtcaagttcaacgaggaacacattcccgacagccccttcgtggtgcctgtggcttctccgtctggcgacgcccgccgcctcactgtttctagccttcaggtgaggcaccgagagaaaccgcccacctggggctcctgggcccggacagaccagagccaccgcagagaccaggccttggccctgtgttcagtgacccccctggcccagctctgggttccaggcctctgctctggccgggtgcagcccacgcttggggtcggcaggaaatatcctgcccaccacgtggagtttttctcgtgtctcaggtctaaaggctttgaacagaagcctgtgccccttgagcaccagggctgcggtttaaagagggacagcctgccaaggctgggtgctgcccacagggtggggcagccctcccttcctgccacctgggtgtgtgcgacggcagagtgtgggggcaggggcggggatgtgcgcctgtggcttgctgccccttgcaaatcagtggctctccctctttaaaccaagttggacgccagatgggtaagtgcgacccgcgggcctcttgctcctggggcctttccgtcctcccttgccctggctcaagcacccccatctaaccatgtctgctgtgcttccaggagtcagggctaaaggtcaaccagccagcctcttttgcagtcagcctgaacggggccaagggggcgatcgatgccaaggtgcacagcccctcaggagccctggaggagtgctatgtcacagaaattgaccaaggtgaggccctgtccctgcccggccgccctgccctgctggctggaagcaggctgagagtacaaaaggaaggtaccgcttctgtaagcagccaagacggggccccaactcctgggccccctaagccaggcaaccctttcccaattggtgacccaagccgctggggatgtggctcgccacccacagctattaggaaggccttctaccctgcagtaccatgccatctccacagggaaagactcaaagtccagcctcagtgctgcccggcccttcagccacgg

SEQ ID NO: 139592 - DNA, 5517 bp, Homo sapiens
gtcagactggtctcaaccgcctgaccccaggtggtccgcccaccttggccttccaaagtgctgggattacaggcatgagccaccacgtccggccgcttcatttatttttatggccgcataatactccattgtgtggccagaccacattccatttttccgttcacttgctaacagatattgaggatgagcttgcctttggtgatcatgaacagtgctgttaacagtgagtccaggtgtttgcgtggacatttgctttcatttctcttgggtagttgcctcggagtgaaccggagcatcacacagtccctctgtggtcaactgaggaactgccagactcttcccaaggcagctggaccattttgtgtgcctgccagtgtagctgagggagcttctgagtctcctccaggctgctcatgcccttgcccttgcccctgtgccctgcaggtgaatgtgggagctggcagccaccccaacaaggtcaaagtatacggccccggagtagccaagacagggctcaaggcccacgagcccacctacttcactgtggactgcgccgaggctggccagggtaaggcctggctgtgggtgggagggcaggtggctggggtgtccctgcgaggtctcagcctccgctcctctccccgccgcaggggacgtcagcatcggcatcaagtgtgcccctggagtggtaggccccgccgaagctgacatcgacttcgacatcatccgcaatgacaatgacaccttcacggtcaagtacacgccccggggggctggcagctacaccattatggtcctctttgctgaccaggtgggtgctgcgctcctggccgctaagatgtcattgcggatgacgtctgccctcctctaaggccttctcctcccactgcctgcaggccacgcccaccagccccatccgagtcaaggtggagccctctcatgacgccagtaaggtgaaggccgagggccctggcctcagtcgcactggtgaggacaggtaccccatggcaggttgcggggcatcaagggtaggagggcttggggcagggtgcccctacatggtccctgtgtgttcctcaggtgtcgagcttggcaagcccacccacttcacagtaaatgccaaagctgctggcaaaggcaagctggacgtccagttctcaggactcaccaagggggatgcagtgcgagatgtggacatcatcgaccaccatgacaacacctacacagtcaagtacacgcctgtccagcaggtagccacaccctccactacagtcaccgagtccccagcctcctcatgcagcagcctaggggacagctccgagggactttctgcccactctcattccttacctgggagaggacaggcatggaggtccaggagggggttggggagcaattctggtgtctctaaatacccccttcccttctgcacccttcccagggtccagtaggcgtcaatgtcacttatggaggggatcccatccctaagagccctttctcagtggcagtatctccaagcctggacctcagcaagatcaaggtgtctggcctgggagagagtaagtagttggggcccttgtcgcaaaggcctttgtcacatccagggattggctgagctgggtgtcatgtctctctccttcctttcatcgtttccacagaggtggacgttggcaaagaccaggagttcacagtcaaatcaaagggtgctggtggtcaaggcaaagtggcatccaagattgtgggcccctcgggtgcagcggtgccctgcaaggtggagccaggcctgggggctgacaacagtgtggtgcgcttcctgccccgtgaggaagggccctatgaggtggaggtgacctatgacggcgtgcccgtgcctggcagcccctttcctctggaagctgtggcccccaccaagcctagcaaggtaattggggtatgggaggccctaagggtagaacccactgtgctctctgagggccccaaaggtaccccatcttctccagacctgccctaaatccttttttttttttttttttcctgagacagactgtcaaccttgaccctgtttaagtgagagtaaaggggaggagggaaatagaaacccacaaaaagtcatcagggttgaagaatttcttttttttttttttctttctttttttttttttttttttttttttttttttttgagaaagagtctcactctgtcgcccaggctggagtgcagtggcgcgatattggctcacggcaccctccgcctcctggcttcaagcaatactcctgcctcagcctcccaagtagctgggattacaggtgcccgccaccatgcccagctaattttggtaattttagtagagacgagatttcaccatgttggccaggctgttctcaaactcctgacctcaggtgatccacccaccttggcctcccaaagggctgagattacaggcgtgagtgaccgcgccctgccctcctttttgtccttatgactgatggatggcccatctggcaggcagcctgggcccgcccgtgtccctgtttggtgagggcaggaagccagggcaaggggaggcaggtggaaagtcaagcaggaggtctgggatcggggcatagtgtggccttggctcctgaccccttcttccctcaggtgaaggcgtttgggccggggctgcagggaggcagtgcgggctcccccgcccgcttcaccatcgacaccaagggcgccggcacaggtggcctgggcctgacggtggagggcccctgtgaggcgcagctcgagtgcttggacaatggggatggcacatgttccgtgtcctacgtgcccaccgagcccggggactacaacatcaacatcctcttcgctgacacccacatccctggctccccattcaaggcccacgtggttccctgctttgacgcatccaaagtcaagtgctcaggccccgggctggagcgggccaccgctggggaggtgggccaattccaagtggactgctcgagcgcgggcagcgcggagctgaccattgagatctgctcggaggcggggcttccggccgaggtgtacatccaggaccacggtgatggcacgcacaccattacctacattcccctctgccccggggcctacaccgtcaccatcaagtacggcggccagcccgtgcccaacttccccagcaagctgcaggtggaacctgcggtggacacttccggtgtccagtgctatgggcctggtattgagggccagggtgagttgccctgccgtggggtatgtgacgggggacagggaccagaacccccgagccccaagcctcctctctgtgcctttgcaggtgtcttccgtgaggccaccactgagttcagtgtggacgcccgggctctgacacagaccggagggccgcacgtcaaggcccgtgtggccaacccctcaggcaacctgacggagacctacgttcaggaccgtggcgatggcatgtacaaagtggagtacacgccttacgaggagggtgcgtgctggggactcccacaggctggcagacggggtgggtggggtggcccgggctcctcctgacctggcctgcactcctccaggactgcactccgtggacgtgacctatgacggcagtcccgtgcccagcagccccttccaggtgcccgtgaccgagggctgcgacccctcccgggtgcgtgtccacgggccaggcatccaaagtggcaccaccaacaagcccaacaagttcactgtggagaccaggtaagggagcccccaggagcccgtgtggctggtgggcctgggaaccccaggaatgaccggctgtctgtttggaccaggggagctggcacgggcggcctgggcctggctgtagagggcccctccgaggccaagatgtcctgcatggataacaaggacggcagctgctcggtcgagtacatcccttatgaggctggcacctacagcctcaacgtcacctatggtggccatcaagtgccaggtgaggaggtggcggccagggcagggctgggactgtctgctcgtccccaccctgtctcatacagccgccatccctttgccccaaccctcaggcagtcctttcaaggtccctgtgcatgatgtgacagatgcgtccaaggtcaagtgctctgggcccggcctgagcccaggcatggttcgtgccaacctccctcagtccttccaggtggacacaagcaaggctggtgtggccccattgcaggtcaaagtgcaagggcccaaaggtgagtgtttgcatgcctggagccaggggtcaggagggcagtgtcctgtttgagggccgggaaaggaaactggaggcccaaagtgaggaccagagtgcagaggtggtgcaagtgtgtaggtgtttttggaagagcctcaggtgacagtgcagccaggtgggggacttggaggaggtagagcagatgggactggtcactgagcagatgtggcaggaaggcaggcaggcaagggtcccagctggcacccagatgggtgtctttcgtgccagagggggtcaaggccattcccagggtcgggtggatgaggataaagcgaggtctaggcctggggctgggtcctggccgtccagtgtggtggggtaggaatggaggcccaggagactagctgatgctctgtccctggggctggggccaggcctggtggagccagtggacgtggtagacaacgctgatggcacccagaccgtcaattatgtgcccagccgagaagggccctacagcatctcagtactgtatggagatgaagaggtaccccggaggtaagaggcagggcctgctgcctgtggggagtggcccaggctggatgctgagaacctgtctgactgctcacaacaccaatccctcacagccccttcaaggtcaaggtgctgcctactcatgatgccagcaaggtgaaggccagtggccccgggctcaacaccactggcgtgcctgccagcctgcccgtggagttcaccatcgatgcaaaggacgccggggagggcctgctggctgtccagatcacggtgagctccgggcacaggcaggggaggcaggggggcctgggcggctggagtgtgggctgcgggtggctggtgtctgatctccctgcggagctgcaccaaggagggcagggaaggacagggcccctgtctttggtttgctaaggttgtgactaccttaggatggtggtgacaggcacaggcttccccagacgtgcacttgctgctaactttgagcacgtcaccaaagccttctgtgcctcagtttccccacctgtaatattctcatggggcaggtataggatagaagcttgagatcaccccggtgagctcctcctagtgctggccaggccctggggctgaggatgggtgccaagctggctggccgcgcctgttgtcatgtgggaagtgtgggatgttttagtctccattctggactctgccaggtgcaggcagcccttttgggccatagcagttaagatgcctgaggcccagagactgtccctgtagc

SEQ ID NO: 139593 - DNA, 3506 bp, Homo sapiens
ggtccccaggggtcttgggttacatggcggctaggtgatcaagccacccaagagtcagacaagagtgggtttttgggactagtgaaaacgacaagagaatgctaataggttcctccagtcacagaagcctgctgcgtggggtcctcggggaggtagcatccagcggtctttattataaatggagatgaaccaggtctcagtaacagggacctaaaacccagtcaaggctcacacaggaacaagggcccagtgcggtgagaatgaatgttccagaaaacaggctgggcctgtcccagcagcgagagcacagctgggtcccgaggccaggctctgtgccacagctcacactgaatgaacttgcccagtttggaatgtgcctgacttaggggccagcagggagggctgaagggtggaggggtgaggctgtggccttaacagctggcccgtggttggctcgccttcccctgccaggcatcgagcccacaggcaacatggtgaagaagcgggcagagttcactgtggagaccagaagtgctggccagggagaggtgctggtgtacgtggaggacccggccggacaccaggaggaggtagggccagctgctggcagcagaggccccgcagcgctccctttcagtggggctgctcttagcaaaggctcacaggctccttcccactgcaggcaaaagtgaccgccaataacgacaagaaccgcaccttctccgtctggtacgtccccgaggtgacggggactcataaggtgagcccttggccaggggggaggcttgtgacctcaggcagtggctggaggcccccagccctaccctcacggcccacccttctggggacaggttactgtgctctttgctggccagcacatcgccaagagccccttcgaggtgtacgtggataagtcacagggtgacgccagcaaagtgacagcccaaggtcccggcctggagcccagtggcaacatcgccaacaagaccacctactttgagatctttacggcaggtgaggggaggctgccaaggcccagctggtctgtggggagagccgcactggggcctgggagctgagcaggtgcctcgtggcaggagctggcacgggcgaggtcgaggttgtgatccaggaccccatgggacagaagggcacggtagagcctcagctggaggcccggggcgacagcacataccgctgcagctaccagcccaccatggagggcgtccacaccgtgcacgtcacgtttgccggcgtgcccatccctcgcagcccctacactgtcactgttggccaaggtaggcccggccctgactgccctctgctgtggcactgcagtctgggcctcccacaggagggggaccccctgggccagtcccgctgcagcccgccccggggcccctactctttgagcttctactgtctgggcacatgctgtttttcctcccctgctggggcccttcctcctctcctctcctcgcccctctccatctctctcctcacgctttcaccttcggaagagctcgctccagctgtctagaaacctgctgctctctgctctgcccacagggtcaacggtacttggatctgtcttcttcttggaagggggaggctggggggctctgggctggtgtggagcaggtgggaggaggcctgccatgtcctggcccaggccacagttcctggggtcacagtcccttccagttctgtcttgcatgtccccctccagccaagctctgagggacccaccaatcctgacagcccggccctgtgggaggcaagggaggggtcgcccagccgagctgctggtgctcagctggcccctctgcctgcagcctgtaacccgagtgcctgccgggcggttggccggggcctccagcccaagggtgtgcgggtgaaggagacagctgacttcaaggtgtacacaaagggcgctggcagtggggagctgaaggtcaccgtgaagggccccagtaagttggcctggagccaggccaggatgggtggcggcagcccccgggttcactgctgggcaggcctgaggccctccttgtcttggcagagggagaggagcgcgtgaagcagaaggacctgggggatggcgtgtatggcttcgagtattaccccatggtccctggaacctatatcgtcaccatcacgtggggtggtcagaacatcgggcgcaggtgaggcccccaggcatccctctcccagctctgcacactctgcctcttctcttccttctgcctccccacctgatgatgaggggccacatgggctcttcctgcctggccgccacagtggggcccacgctggctcatgtggtgatcctcggtgttccctgtgtggctctcgcatttgcagtcccttcgaagtgaaggtgggcaccgagtgtggcaatcagaaggtacgggcctggggccctgggctggagggcggcgtcgttggcaagtcagcagactttgtggtggaggctatcggggacgacgtgggcacgctgggtaagttggaggctgcagcatgggcacctggggacagacgatggcaaggacggcccaccctgaggctccagggcactgaggggactggtggctgttgtcaggcttctcggtggaagggccatcgcaggctaagatcgaatgtgacgacaagggcgacggctcctgtgatgtgcgctactggccgcaggaggctggcgagtatgccgttcacgtgctgtgcaacagcgaagacatccgcctcagccccttcatggctgacatccgtgacgcgccccaggacttccacccagacagggtaaagagcaggctgtgatggcctaagtctcgccctgctgctcctgcttggggtctggtggggatggcactctgtgtccctggccaccctgcctgggttgtagctctggcagcctggacctggccccctgacagctgggtggtctcccgctaggtgaaggcacgtgggcctggattggagaagacaggtgtggccgtcaacaagccagcagagttcacagtggatgccaagcacggtggcaaggccccacttcgggtccaagtccaggtagagcacccacgggtgttgggggcagggcaggtgtgggcacccaggcctgggcactgaccagcaggccacctgctcctatctgcctgacaggacaatgaaggctgccctgtggaggcgttggtcaaggacaacggcaatggcacttacagctgctcctacgtgcccaggaagccggtgaagcacacagccatggtgtcctggggaggcgtcagcatccccaacagccccttcagggtgagccaacctccaccggcctttagtccatctcgatagcattcacgtagcacacgattcgtccatttcaagtggttgtggcacaccatcctgactcccctgtcccacagctcctggtgaccactaacctgctttctgctgtggctttgcctatcctggacatgttctatagatggaactgtgtgccatgtggccttttgtgtctg

SEQ ID NO: 139594 - DNA, 1158 bp, Homo sapiens
ccccactccaggtcatgggccctggattctgggccagctggagtcagcctcctcctcctggttccccataggcccctgaggtgtgtggcggacccctgctctggcagctgtggacactgtccagctgttctccagagctgcccatctgcaggctgggtctgccctctgcccttcctctgggcccagggcttctggcagtaatcataccctgctggcatcgtgtgtgtgtgtctgtgtgtatctgccctcaccccaaagtctccttcacctctgaacaccccctgggaccctgggcagagagggcctcatccacatcctaccactggccaagagggggtgtctacctcctccttggcccctgctaccccgtgctgccagaccctgaccccaaagcctgggatcggcccctcccgcacagccgtgtgcccagcgtggccactcttctactcacagacagcaaggccatcgtggacgggaacctgaagctgatcctgggcctcatctggaccctgatcctgcactactccatctccatgcccatgtgggacgaggaggaggatgaggaggccaagaagcagacccccaagcagaggctcctgggctggatccagaacaagctgccgcagctgcccatcaccaacttcagccgggactggcagagcggccgggccctgggcgccctggtggacagctgtgccccgggtgagggggcgcagaggcaggagagactgggctggggtcacccatgggtggcccttgagggggttctgcggcccccagactcacagcctcccttgcgccacaggcctgtgtcctgactgggactcttgggacgccagcaagcccgttaccaatgcgcgagaggccatgcagcaggcggatgactggctgggcatcccccaggtacacccgcccggcctggctacagctgtaggggaccggatcggcagttgggagagactcggaggcccgatggctcctgttttctgcctgtgacaggtgatcacccccgaggagattgtggaccccaacgtggacgagcactctgtcatgacctacctgtcccagttccccaaggccaagctgaagccaggggctcccttgcggcccaaactgaacccgaagaaagcccgtgcctacgggccaggtgagggagcc

SEQ ID NO: 139595 - DNA, 2021 bp, Homo sapiens
aagagagccaccccaccccccgcaggggccctggggaaggaaagtcccttgtaaggcgcgccggctgcaggccaagcagtcccgcgccagacactgctcagcctttcctcgctctagggcgcgtttcctgcagcgccaacgcgaggctgcggggctgggagcatccttgcccaccccactgcccagcgacccaccctggagcccgggtttcgcgtctgatcagccgaacccgggggcctagtgggggcattccaacgggcggggcggggtggggcaggcgcgccctcgaagccccaccccacggcccctccccgcaggaggcccgccctctggccccgccctcctcccgcatttaaagggctcgctctctccgcagcgcaacctctgctccctgcctcgcctcccgcgcgcctaggtgcctgcgactttaattaaagggccgtcccctcgccgaggctgcagcaccgcccccccggcttctcgcgcctcaaaatgagtagctcccactctcgggcgggccagagcgcagcaggcgcggctccgggcggcggcgtcgacacgcgggacgccgagatgccggccaccgagaaggacctggcggaggacgcgccgtggaagaagatccagcagaacactttcacgcgctggtgcaacgagcacctgaagtgcgtgagcaagcgcatcgccaacctgcagacggacctgagcgacgggctgcggcttatcgcgctgttggaggtgctcagccagaagaagatgcaccgcaagcacaaccagcggcccactttccgccaaatgcagcttgagaacgtgtcggtggcgctcgagttcctggaccgcgagagcatcaaactggtgtccatcggtgagggacgccccgaagcgccgggcgggcgggggcggggactccgtgcgtccttccatctccccgggcggacccctccaaaccacccccttccgggccgcagcgcaactcccgaggcctccggctgctctgctccacgcgggcctgcagaacaaaggcgcgcgggctggctggctggccggccgggcgtgcgaaccgctacgcgcccccgcccgctgcgccccggctggccggcgcccaggctgaactcacatcctccgcaggccgcgcctccgcggctgtgctcgcggtgggagtgggcctggggggtcgggcactgggcaggctcctggccctgcgccccgtccccgaggaggaggaggcccgggctctccccccacagctgtttagagagggccctctggccttcagaggcccgttggttctgaagtgtgggttggagctcgtgcgtcccattgtctggggctctgggctctttgtgtccctggaggatgggtcgcccatcggagatggctccaaccaccagtttagatctacccccccacacacacacaggcaacctgggggccagaaagaagcatagttagcaaaactgcacccggggtgagttgggcgtggttgactgagagacctggcttgtagactacttggacgccaacttttctcttcatcttgggccaaactcttgcttccatgtaggccttgcttttctgcgtgtagcacgcaggagttggttggtagatgctccagcgtgcattgtgccagcccagtgtctgtgtcactggactggagaggctggcattgaccaggcctgctgcagcagcccaattcgttctcaagataggggctgcatgagagggcaggccccagaatgggtgactcgggggtgatgtggaacagggagaggagagggatgatgagtcttctcttcttcagaattgagaggccttccagttaccctgcagccctggaatggcccttgctgaacccaagaaagtgagggaccaagacttgggttcccccagccactcagagggcagatcccaagaaccaaagttctttctttggaatgccagttgaggcgaggggcaggcccacccccacaagtcccagcctcagtctagccaagctgagtcatctcagtcctggatggtag

SEQ ID NO: 139596 - DNA, 2711 bp, Homo sapiens
gcgcgggcccctccccctccatcgctagccaatccccgttttgtgacgtatgggctcgcggccccgctcgctcccaccgcgagaccttttgctccgcgcccgcgcgggccccgccccctccatcactagccaatccccgtgcttgtgacatatgggcttgcggccccgcccgctcccatcgcgagaccggttcccaccgccctgactcccgggcgggccccgccctctccgccgctagccaatcctcgcgttgatgacgtttgggctcgcggccccagcctcccagctctcagggcacggccggtctgtgccggctgctcccgcggttaggtcccgccccgcgcagcgcgcgcagcctgcggagccagcggccgtgacgcgacaacgattcggctgtgacgcgacaacgattcggctgtgacgcgagcgcggccgctcccgatgcgctcgtgccgcccccgccgtgctcctcggcagccgttgctcggccggttttggtaggcccgggccgccgccaggcctccgcctgagcccgcacccgccatggacaactacgcagatctttcggataccgagctgaccaccttgctgcgccggtacaacatcccgcacgggcctgtagtaggtacgcggcggcgggcgggaccccttccgggccccctcctcgtgctccgcctcgcgacctccccgctgccctccccgcgcgccttccccggcccgcggccctgaccgccccgtgtccggccaggatcaactcgtaggctttacgagaagaagatcttcgagtacgagacccagaggcggcggctctcgccccccagctcgtccgccgcctcctcttatagcttctctggtgagagcctcgcctgtggggacagcctgggacgcggggaggatggggtcgcgagggtgtggcaggggggccggtcgagagcggcactggagaaaggggagggaagtctgggggggcaaacagttctgtctcctcctttcaatccagacttgaattcgactagaggggatgcagatatgtatgatcttcccaagaaagaggacgctttactctaccagagcaagggtaaggcaggggttgggtgggcacgctggcaccttcacccgacttcgtcagggaccccgctcacagggaggacctgagacctcagtcccaaccactccagcagccttaggagggagaaactgttacaggtcccgaaatgggattcagattagggccatcaggccaggcggggcacaccgatgccccctctgctaccgctgccccccttcccaaggctacaatgacgactactatgaagagagctacttcaccaccaggacttatggggagcccgagtctgccggcccgtccagggctgtccgccagtcagtgacttcattcccagatgctgacgctttccatcaccaggtgagctggctggcaggcgtcctgtacttgggtacaacctaggggatcgcggctgtgtttggataaatccaggggggcactgggtacaaatggtggctcttgggcctccggggagactctgtgtgactagagcaccctggtctgggatctaggctcagactcttcctgagagtcctgggggcaaaaggggatgctggggcatgagcacaagtggcaaggccccatggataaagggctgaacacccagagccattcaggagggtgtgggttcctggcctctaaccaaaggtcagaggggactggctggggaagtttggactgagggacatgacagggccatggtggccctgccagccagtcccctcgccctgactctcttctgcaggtgcatgatgacgatcttttgtcttcttctgaagaggagtgcaaggataggtgcgtagtgggggagcccagggacgggctggttctgggtccaggctcctggcccacttgctcccctcttttgcctcagggaacgccccatgtacggccgggacagtgcctaccagagcatcacgcactaccgccctgtttcagcctccaggagctccctggacctgtcctattatcctacttcctcctccacctcttttatgtcctcctcatcatcttcctcttcatggctcacccgccgtgccatccggcctgaaaaccgtgctcctggggctgggctgggccaggatcgccaggtcccgctctggggccagctgctgcttttcctggtctttgtgatcgtcctcttcttcatttaccacttcatgcaggctgaagaaggcaaccccttctagagggagccatgagggtctgggcttcagagctaggtctttggggaagtcctggctgactgccttagcagtgggggtgggggtgggggcaggggcaggggctttatgtgtttttgcttggggggcgctgggcctagcccagagtagtgcttgctccccctgccttgtcccaccagggaggcagcagactcaggccctccatggtcctctttgtcattttgttgacatgcattcctccttttgtcatcttgttggggggaggggattaaccaaaggccaccctgactttgtttttgtggacacacaataaaagccccgtttatttgtaatgcgttggctcttcctggaggagagggttgggctcccatggcaagggcctctgcgtcttggggctccaggattgcaatccggctttgttgggtccgcatttttgctttagtctggggataggaatcaaa

SEQ ID NO: 139597 - DNA, 2906 bp, Homo sapiens
cagggacactctcgcggtcgccgggaggcccacctagggtactttccttttttccactctcagaaatatacgtctgtcacagttaacggcaaagcctagggcaagagttctacgcccaagatggccagccggaagcgggcttctcgcgaccatgtggcgaagccccattcgtcagctggccgcccgcggccctggtacccggtcacctctctgatctgcgcatgtgctgggctacgcccgggcgcaagcgccaagagcggctgcgtctatggtcatgacgtctgacagagcgtccacccgtcttcgacaggactctatggttcttacgcgcgcagacagaccgcctatataagccatgcgcaggcggaggagcgcctctttcccttcggtgtggtgagtaagcgcagttgtcgtctcttgcggtgccgttgctggttctcacaccttttaggtctgttctcgtcttccgttccgactctctctttttcgttgcagccactgaagatcctggtgtcgccatgggccgccgccccgcccgttggtgagtcttgaatccgtgtactttcactgctgggaaacgggcggggaaagaagtgcctatggccgctgaaaacaattgtggggtggagcctcccccgtgcggcggccctgtcttgggaactgaccctatgttttacacctcccggctattttttagtctgcaatattactgtctgttccttcgttcccgtgtcggtgtggaagcgacggttccctcgtatctctgcctgtgtcctgcaagctcaccgcattttcgggcgctagatacgctcttggggcctttgtgtgcgttctctgtcttatttccgggcgacgtgccgcgtgcgttgtcggacgtgaagggcagtccgggaaaaacgggtgcggccgcctcctgtgtcctacagggggcgccagacgcatttccactcggcttggaggtggatttagtgccacgtgcccgaaagtcttaaattgggtgacctgagctgtgcaatgataatgcggcgattttgtagtacgcagtgtcttgaagagagaatttttaactaggaaagtttgttgcaaagtgtttataggaagcgtaagacaaagtaacggaagatggtgtctgttgtttctagtcttgggtgttgtctgtgttgcagcagccaactgttgctttgtagtttatttccccgaatggaaacggtttagaagtggacgtgcattccccacccttttcccgtccctcgtttgggttgttccttgaggggcaaagtgcctgttgggctttctgtgaacctcacctaacctgtgttttttcactcccctgcagttaccggtattgtaagaacaagccgtacccaaagtctcgcttctgccgaggtgtccctggtaagtagtggaagagcccctgcactggttggctctgcggactccgcgtccgtctgtgacaccccctgcacacttacccaatccttttagatgccaagattcgcatttttgacctggggcggaaaaaggcaaaagtggatgagtttccgctttgtggccacatggtgtcagatgaatatgagcagctgtcctctgaaggtaaggcaggattctttgttcgtcaccccccagtccttcctccgtgctccctcaaccccacccacatacactgcactggaattgggagttgatgaaacatgagccttacaaaactcagccaacacagttcccctgagctggagatagtcgtggtgaatgtttctctattatcttctctcactttgctgcttttcttctccctacctagccctggaggctgcccgaatttgtgccaataagtacatggtaaaaagttgtggcaaagatggcttccatatccgggtgcggctccaccccttccacgtcatccgcatcaacaagatgttgtcctgtgctggggctgacaggtgagcttggtctgggccttttaaggcagttggagtctctacattattaggcttgcattattttatcagagcatagaggtggccccagtgactcagccactatggctactagaaaagccaggctggcaagtgactttcagtggtcactcaggaccccttcctgcagatacaaacaaagcatgagtaagtcttagcaagctcttccccacaggttaggggaaacactggtgatgggagtagctcttcttgcttttagctgaatgacaaccatcttgccagcaggtagctgaagctggcagaggagcccagtggcgccttttcagtggttcttgggatgctccgcagccaattaagccgactgagttcctttcctcatggggacccagtgtgcgatggctgcacacagcagcttccttggtagtgtacgcagcctgttggttgtatgggttgctctaagggaccttggagacaggcctttcaggtggatgttcatgtttctgaccttgcactaccccaatgtaggctccaaacaggcatgcgaggtgcctttggaaagccccagggcactgtggccagggttcacattggccaagttatcatgtccatccgcaccaagctgcagaacaaggagcatgtgattgaggccctgcgcagggccaagttcaagtttcctggccgccagaaggtatgtagtgctgcagcccccttctcccacctttgccccaggcctcctgactcagttctttccattgctccttagatccacatctcaaagaagtggggcttcaccaagttcaatgctgatgaatttgaagacatggtggctgaaaagcggctcatcccagatggctgtggggtcaagtacatccccaatcgtggccctctggacaagtggcgggccctgcactcatgagggcttccaatgtgctgcccccctcttaatactcaccaataaattctacttcc

SEQ ID NO: 139598 - DNA, 1821 bp, Homo sapiens
tcttaccaatccacaataaacatggcccattggcatatctgctgcacaagtgtcctatctcaccaatctgggtttttgttctcagtaactttccttcttgtcatacaacatcttcattcctctttctgaaccctcccttcccctaccccaacccagagcccactttgtctccactcctgatactacactacctggcaggtggcatgagtgcagggcccctggcttcctctcctaatctaggcacaagcccaaccaaagaacaagagccaaatcaaacaaggcaggcaggggtggactacagtcacagggcaactatagttgaagccccccagccccagggctggatggacgggggaggctggggtttaagtcccaaaaggcagcaggccctgggggggtagggggacgctcaggcagcagggcacagctgaggggacaggagtgatagcagcaacagaacagtgaggctgagaggctggacgctgtgcgcctggctcagcttcagctccacctccacggggtagtggtcactgatgttgagggcctgggaatgggtggtggggcagtgtcagtgcccggggccgaggggcttccctgtgaccctgctgctgccctccctcctcatgccagccccatcccttcacctcctcctcggtgagctggaagctcgtggggaagtcaaaggcagccgcagtgtgcagcagactccggcagcgctccccgtgcagcacgacgcggtcataggtgcagtgggtgctggcccgcactgtggtgtcctccccatcggcaatcacccagtggaagcctggctcagtccgcagctccagcttgtccaggcgctttttggtcagtgaagcgcagtcagcattgaagtccccaagcaggatcacgtcctagagacacagcagccatcaggctggccgctgggccaccctatccttgtccctcctgtacaaactgcccaggcctaccttgctctgccagtgctgggagacctccagaaacacatcgtagagggcgttcagctccttctctacggccttaggagtggtgtgcagcgggaccaacaccaggctgggaaggactgcaaggcccagggaccgagggctgccatccactcctggaccttctccccctagcccgtctgggtgaggaagcccccagtggagccagccagaactccccttctgctcccacataccaagcccacccttcccttcctaccattgctgggcaaagagaactgggccacaaatggctcccgggcaaagacgtcatcctcatcgttgtacacgtaggaactcaggacctgtgttttgtgtgacctgggaggacaaagggatgggcagcagtggccccacgtctttgattttggcttgcaagtgccaaacggcgctcagggaggggccctccactaacagcggcaatgtgggcacagccctcccaacctgtctctagaactttcaaaaatcaggcataattcatatgccataaaattcacctgcttcaagtatacaacacggttcttttgtacattcataaggctgtgcaactattgctacaatcaattttaaaacattggtatccattactcctaataaaaacataacatccattaccagttactctccattctcccctccccccagcccctgcaaccattaatctgttctctatcttgtacatttgcctattctggatatttcatatgaatgaaatcagctcatcaatgttttctgcgttcgtccatatgctgtggcacgtctgtgcttcattcctctttctggctgaataatattccacggactgggtatagtacat

SEQ ID NO: 139599 - DNA, 2082 bp, Homo sapiens
atggcgtctaccagaaggggatggacttcattttggagaagctcaaccatggggactgggtgcatatcttcccagaaggtcagcagggctgactgggtcgagcccccccagtatgagcgggatgggctcccaagcctcgcctctgtgctctctcaccagggaaagtgaacatgagttccgaattcctgcgtttcaagtggggtaagggctgctggtctctggccacagccatcctcccggcccagagatggccctgtgggcccctggctcccgccccctcgggctggcttgtatgggggtagatgggcgtgtttgtagcgccaggaaggggacaggtgctgagactaggcctgcctctcgcaggggcttgcccaagggagctgaattgaactggaggatgtcgggggtggcagtggccagaggctggcacagaagcttggctcagggcccagcttatgctaacatttctacctcccccctgggcaggaatcgggcgcctgattgctgagtgtcatctcaaccccatcatcctgcccctgtggcatgtcggtgagcctggggacggggacagagagatggcatctggggtggggggcctgggactccctctggtcccaggctgccctgctccaccccacgtctggccttctgtccactgtgctgcaggaatgaatgacgtccttcctaacagtccgccctacttcccccgctttggacaggtgggtggggactgctgaccttcggctgtctgcctgtctgctgtctgctccgtgtctcccactcagcactatggaggccagctgcaggaggagctgagcatgaggctacagcaggggacagagtggaacatagacagggacttcctggcaccgagacattaaaatgagagcagaggaagtcaggctggggcagaggtgggctgtggggtcaggacaggacaggtcatctacagcacaggacccaggaccaggaccttgttttagaggaagagtggcccctggggagtgtgtggcacagcagggccggggcttagcttctggctcccgggttgcttgggctggggctgtgggcactcctactgctcctcatcactcttggcggccaccccacagaaaatcactgtgctgatcgggaagcccttcagtgccctgcctgtactcgagcggctccgggcggagaacaagtcggctgtgagtttcctcctgggtcccccgtagctgtccccggaccccctgctgctggcttccagcagggtgcctccaccctctccatcccgtcaccctcccagggcaccctcccagggcaccttggccaagcttcccgaggggtgcaggccatccctggtcctttccctcaggtggagatgcggaaagccctgacggacttcattcaagaggaattccagcatctgaagactcaggcagagcagctccacaaccacctccagcctgggagataggccttgcttgctgccttctggattcttggcccgcacagagctggggctgagggatggactgatgcttttagctcaaacgtggcttttagacagatttgttcatagaccctctcaagtgccctctccgagctggtaggcattccagctcctccgtgcttcctcagttacacaaaggacctcagctgcttctcccacttggccaagcagggaggaagaagcttaggcagggctctctttccttcttgccttcagatgttctctcccaggggctggcttcaggagggagcatagaaggcaggtgagcaaccagttggctaggggagcagggggcccaccagagctgtggagaggggaccctaagactcctcggcctggctcctacccaccgcccttgccgaaccaggagctgctcactacctcctcagggatggccgttggccacgtcttccttctgcctgagcttccccccgaccacaggccctttcctcaggcaaggtctggcctcaggtgggccgcaggcgggaaaagcagcccttggccagaagtcaagcccagccacgtggagcctagagtgagggcctgaggtctggctgcttgcccccatgctggcgccaacaacttct

SEQ ID NO: 139600 - DNA, 1815 bp, Homo sapiens
ccttgggtaacgtggagcagggagtggtgtgatttctcaattaaagaaagcccacaggacccaccagcagttcctgggctttccgactgagaaccccggtggccaaacagcagcaaggtcctgcccacaagggaggggaggctgggcgagtgtgtataccaaacaggttagggaagctgattaaaatctcctcagggcctaactgggaagggccagaggaagctggggatgggagtggagggtaggagcaaaaggacaaaggacatctgtaggttgtggagaaaaagggatggggtcggggccactgtggtcctaagagctcaaaagacttcaatgctcgatgcttcctccagcatgttctgagatcctcacctctccccttccgccaaaagcaggtggggggagggtcccgtccagactggacatagccgactctccttttctctggctgggaggcctgccacaaatgctcttggctgccccaccccctccccgcagcttccctgttccctccccagttcctcttgtctgtagggtgggcaaggcggctgactcctactcctgagttaccacaagtcagctgcctgcagatctccccaccccatgactgccttccatgtcttctcaccctgccctgagagtgctggagggaagaggtgagtctcccaccccacccccaccaacacacagttgcgctccaccatactgaacctgactctcagtgagactttgctggccctgagaatgcacggggaaggtggctgtcccctgccttggcccccatcacttgccaaacctcctcagatgtctcccctatttccctaatagctgagcattgaggatttcacagcatatggcggtgtgtttggaaacaagcaggacagcgccttttctaacctagaggtgagagtcctctcccagccaggggccatgggggacattctgtgctccttctcccagcataagaactgtactctgacctcatatcagggttacttgggtctgagtctcttctgggtcaaccatcccccccaaaaacaacaacaacaacaaaagccacctcatactcttagggagcagagacgctggctttggggtagaaaggcctggggcctgaatgtcaggggctggggtgtgggccattttcttggtgagcctttatgggtatggcttgccagaggagagctgccagagaggtgtggggggctgggccaggcccactggcccctggctaactcaccttttgcctctcccctgtccccagaatgccctggacctggccccctcctcactggtgcttcctgccgtcgactggtatgcagtcagcactctgaccacttacctgcaggagaagctcggggccagccccttgcatgtggacctggccaccctgcgggagctgaagctcaatgccagcctccctgctctgctgctcattcgcctgccctacacagccaggtactgcccgcatggcccagccaccagcctcggggcccagagagcagcaaggccctgggctatggcatgtggtggcaccgtttggctaaagatgccagtactccccaccccctcacagcccttccagaaggtgccctgtgtggccagaagaggaggggagggcctcttctgtgactcaggagttggtgcctagcactgagctgggcctccagagatgaggcagatgtgagccctgcgggtggggagccttctcacctagccaggcccttgtcacagagcaggtggccaggacttgagtgtgactgagaagcctcggggtgggatgggcttccaggagggggcactgaggtaagagtg

SEQ ID NO: 139601 - DNA, 1756 bp, Homo sapiens
ccctgtggtgtgactatttggagtggctgactctgggggcagggctaggatgagcactcaagtcctgcctccccattccaggggcagctttccatctcgtcctgtgaggcttgtgggtggcagacttggacactaagtctaaatgaccctaagtttgagggactaggaatgtcatcagggtttagggggcatcagggaaggcttcctggaggaaaggtctcctctggctgatgggactttgagatagtggacagggtgtcctgttgggaggggaaggagggcacgacaattgggttcaagtgtgacactctcccagggctgctgaaagaaggctggttgggtgtttctgcaggtggcccgtgatgtagccgtggtggccggagggctaggtcgccagctgctacaaaaacagccagtatcacctgtgatccatcctcctgtgagttacaatgacaccgctccccggatcctgttctgggcccaaaacttctctgtggcgtacaaggaccagtgggaggacctgactcccctcacctttggggtgcaggaactcaacctgactggctccttctggaatgactcctttgccaggcaagggcactaggctggggaggactgtgccaccacaggtgaccttcccatcactgtgggtcgcaggtggggcagggagccagggtcaggtctgtgttttggggtggggatggccatggtctggttggggtctgggcagcgtgaggatgtaggaggtgtcatggcatggggtgctgttggagggggagttgctcagacttctgcctccccatgcttgcgagtctttggttgggaccttggttgttaacacctcaaggttacctgggaacctgtcacctcccccttgagcaaaacctctgggactttgtgtgggcaaataccaggccagctatctgagccatttatggggcaaccatgcccttctgtttgctctcgcccccaaagcccagcccaggcaccttagtgaccctaagagggagtaaaaggaggggcagtgagctcaggggaaccagaggaaggacccccatgctggtggcaagggggacctgggtcctggcttccagctctgttccgaccttgcaatgtgactggatcctcagttttcctatctgtcaagtggggacactgcttcttcaggtggctgcaaggacccaaggcagcttaggtaggagcagagctgaggaacttgttcctctaagatgccaaaggccctcccagagcctcacagtgcgcctctttctctggccccacaggctctcactgacctatgaacgactctttggtaccacagtgacattcaagtgagtcctgggggtggttgaggtatgggtgggctggtgtggccccagcctccccagctcacctgacatccctgccaccttccccaggttcattctggccaaccgcctctacccagtgtctgcccggcactggtttaccatggagcgcctcgaagtccacagcaatggctccgtcgcctacttcaatgcttcccaggtcacagggcccagcatctactccttccactgcgagtatgtcagcagcctgagcaagaagggtagtctcctcgtggcccgcacgcagccctctccctggcagatgatgcttcaggacttccaggtatggagcgggcgtggcccagcttcaggtgggggagcccaggctagtggttgagagacgaagagaggcttgggcttgggcatgtagttgagagtcctgtccctgc

SEQ ID NO: 139602 - DNA, 1065 bp, Homo sapiens
cctgtcgggcatcatgtctgtgaacgggaagaaggtgctgcacatggaccggaacccctactacgggggcgagagctcctccatcacacccctggaggaggtgaggctgcccaggcccaagcctatccctgttaacctcccacatagcggcacagggtggaagtagctccccaggtgcctggagcaggaggaggtggtccctgaggtgtctctctctctcccttctgcttacagctgtataagcgttttcagttgctggaggggccccctgagtcgatgggccgaggccgagactggaatgttgacctgattcccaaattcctcatggctaacggtgagggacaggaaggaggtattgcaggtcgggggtgatagggaagacccgaggacggtcaggctccagaggaggcacggccagaccagctagagcctctggagagagccgtgctgatgttgcccttgtgcacccccacagggcagctggtaaagatgctactgtatacagaggtgactcgctacctggacttcaaggtggtggagggcagctttgtctacaaggggggcaagatctacaaagtgccgtccactgagactgaggccttggcttccagtgagtgtgggccccctgagccagagaaatcatggggtggcagggaagccaactgtctttgggatgggtggctgtccagaataaggcacccccttgtccaaagtcacatttcccgtgaaggaccagagaggcccttcactctgtattccctctgccccatgtcatgctgcacggctggctgccaggagggaggtcctcacacagcagggatgtgatgtggaggggaacggggctccttttgaaagacttgagcctggccaggtgcggtggctcacgcctgtaatcccagcactttgggaggcctaggcgggtggatcacgaggtcaggagttcaagaccagcctggccaacatggtgaaacaccgtctcatctcaaaatacgaaaaattagctgggtgtggtggcatgcacctgtaatcccagctactcgggaggctgaggcaagagaatggttt

SEQ ID NO: 139603 - DNA, 3273 bp, Homo sapiens
agcccatatttatacccgctctacggcttgggcgagctgccccagggttttgcaaggtgaggacatgggttttttcagttggcatagctgagtaggactagggccaggagtggagatggccgccttgagcattttcttggtagtatttcctcctttccaattcgtgctcttcatttacttcactccatccttgggtgatgagggcacaaccccagtgcactgaagtacagaagtctccacacttgaaaaaacgagtctccacaaatgtgacttgctcagttcccggcagcaccaggactgggcccagggtcccagaaccttgagtcagggcttagctgggagctgacctatctccagagagtccattctggtccctcaggctgtcttggtgcggagcactgatccctcatgccccctcccgctggcccttggcagtgtattctgagcagaagctccagagaggaaagagcccgcggagatggggccagcgttcacggcagtgacagagctgggatgaatcccggcgtctcctacctgctgcctgcctggggcagccttctttgcactttggtggaggaagggtgcagtggaattggtccccgtttctcctgggaggggccttcaccggagctgctctcaccacagattgagtgccatctatggggggacatatatgctgaacaaacctgtggatgacatcatcatggagaacggcaaggtggtgggcgtgaagtctgagggagaggtgagcccttcccgtgcatgcagtgcagtcccatggttgaggcggggcttggtcactttctctgtgctgtcgagtctcctgctgcacagccccaagggtcttggagctgggaactgggggtccagaagtcttcagagtcatgactgtgggtgagaggtctctttcagaggccacatgccatgtctgtggtgcagaaagtgttcttgatcacagtgcctctggggggcgggggggcgggcacccagcccgtgcgtcaaggcccacctatctgagcggcagggtagggccatgcattcaggaggggcagtagtgatggctccgaggaacgtcttgtctgccagagctgcctgcccttgctgtgagcgcagccccacgtctacctaagggagggatgtgacaggggcgaggacttctggtgccttctcaggtggcccgctgcaagcagctgatctgtgaccccagctacatcccggaccgtgtgcggaaggctggccaggttatccgcatcatctgtatccttagccaccccatcaagaacaccaacgacgccaactcctgccaaataatcatcccccagaaccaggtcaacaggaagtcaggtaggccgggcgctggtacagcttcctctagggtgttctctttggggttactctttttctccccatcagtgtgggagctccctgccttacctctctggaaaaaaatttgagccacattgtagccaccacaacttggagccctagggtttgggtggcctggactctttccctctgggagggtggcggcttggatgctacctgctctgcggggctggggaggggcagtcgggccagacttgtgtccagccactggaacccctctctgcgtatggccagcgcctctggcctgagttgacggagctcttcctgtggccagacatctacgtgtgcatgatctcctatgcacacaacgtggcggcccagggcaagtacatagctattgccagcactactgtggagaccacggaccctgaaaaggaggtggagccggctctggagctgttggagcccattgaccagaagtgagggactgggctgagcccaagggggagagggagggagcccagcagctgggcttagggaccaggaagggcatggcccattgtgaggcctgtcccctcccctctgtctgcccctcaggtttgtggctatcagtgacttgtatgagcccattgatgatggttgtgagagccaggtaagcagctcgtcccagccctgggctcctggctgcccgcccaggatacctgtctgactcaccctgggcgctgggctctggctgtttccaggtgttctgttcctgctcctacgatgccaccacacactttgagacaacctgcaacgacatcaaagacatctacaaacgcatggctggcacggcctttgactttgagaacatgaagcgcaaacagaacgacgtctttggagaagctgagcagtgattgtggccgcccccagcccctgctgccccagcctgtgtctgttctcctcgagggctccagcatcctctgcttcccccaccacgttcccatcacccacctcattgatccactgaccaaatccttaaccctagcgatggcttgggagatggggggttggatagcatcctctttcttggcccttccttatcctaggaaaagagggttcctctccttgtgtgtgtctcttccccccacccctaattcttctgctctgtttgggaagacgtggaggaaaaggtgacttctgcccccaccgctcttacccccactgtagtggcctttggagatgcccccacctcccccccaccaactctcgcgtgttggagagaaggggccctcccagcacaaagttgcattcctcccccctaatttattctaatttattaactttgacccaccctttctgagcctgcagccttcccgtgtggcctgagggctgtcgagtgagctgccccagcccctcccagcccttgcccagcctgggggagtggggaaggcttgggcatggccccgttggaggttgatttgctgttttgtttcttgtctttgtgttctgtggtacttgctgagagaaaagaaaagtgagccaagcagaaggaggtgggaaaacggacccaaaccccagtgtgccctgccccatgcctttcctttagtggtgggaaacccttatcttgcaaagtgaatgtgtccccttccccaccctctagtgtatttcacagaaaacaaaacctcccaataaaacggttgaaacctgaatctctggatcttgatggttatctcccaaaagctgggtacctggcagggctttggctgcctgggttggggctctggcttagcttcactctggactgtaaaaggtggcattcttcaccagggaattcctcacccagagcacgctggggccaaattgacttaaagcttaaggctacccagtgagtcgatgctggcaccaggactgcagccctcagtgctcaatgcagggggagtgtggtggagggcgggtgtcaacgtg

SEQ ID NO: 139604 - DNA, 1023 bp, Homo sapiens
gacgggtgccagttttcggcttaatgcgggggaactagggcagccaggggaccagcgttggggtcaccaggaggaattagagggaccggggcccagccttggctcgggttaacgtcgaggcagcgcgaggggctggggaattcagcctccggggtccacaggagccggcggcgggggctggggcgggagtccacgcaggaccaggggcggtctccggcggggcggggcgggcggtggtcacgctccgggccagctggcgcgcggcggggcggggcatccgtgcgtctcctggtggctgacgtcacggcgcgggcgtcagctgactgttcggccgccaccgccgctgccgctgccgctgtcgctgtcgccgccgccgccgcccgccgccgccgccgccgccgccgccgctgccatggctcaatacaagggcgccgcgagcgaggccggccgcgccatgcacctgatgaagaagcgggagaagcagcgcgagcagatggagcagatgaagcagcgcatcgcggaggtgcgagccggggagcctcggagcatgcgcgctgcccaggtcccctggcggccccgcgccacgctccggccctggaagccctggggcggtggccacggagcgcgggcggcgcgccggggcaggcccctggctcgctgacttccagcagggcacacagaagcaagccagcgacagtctcatctgtgaaatgggcctggagccgggcgttctccgaggctgaggccactagctgatgaccggcctccggcaggagggagccgagccagtgtttctgttgggaggcacggcggggacgggcctctcgtcgcctcgcctgggcacccagcgtcctggctctggcccctcggccctcagagccaggcctctgccccctcggccctcagagccaggcctctgccctggtcctatggacaccgggcagggcggttcgtctccccctggagaggcggggaggcctgagccagacctggcaagtccactggccaggaggctccttccag

SEQ ID NO: 139605 - DNA, 1132 bp, Homo sapiens
gttgacacaagcttcttgcctgatcgagaccgtgaggtaaaggctgcctggccctgaccccggcctcgactccagccctggtggagacccttgcttagggagccaggctctgcgtgcaccctgagcagccctgggcctcacctgtctgcctgctccctctcccaggaggaggagaatcggcttcgggaagagctgcggcaggagtgggaagccaagcaggagaagatcaagagtgagtgtttgcggagtcagacgcgaggggcctgggcccaagccagcttccctgtccacagtctcctgggtggtgcgctgagccccaaggctgctctcagtggggctggagaccaagaggcagctctgccttgtaggtgaggagatcgagatcaccttcagctactgggatggctctgggcaccggcggacagtcaaggtaggcagcgtgcagcctgcttcctgctcaccatgggcccagcctccctcaggttccgtgggaaggaactgaccttcctgacttgggaagccccagggatcctgaggataactggctccagggcctggccccctgtctggggagtgaggcccaggcctggctgaggctctgcagcgtctggcagggccctctgggcctctgccttgttgagagcccttctgcaggcttccgccttcccttcccaactcctggattcccggatacagatgagaaagggcaacaccatgcagcagttcctgcagaaggcgctcgagatccttcggaaagacttcagtgagctgaggtgtgaggtgtgcgtgtgtgcacggtggtgtgtgtggcacctgtggctccagcctgggtgccagacacccagtgtgatgtgggcgctgtctgggcaagcaagcagcgtgctgggcactctcctcccaaaagagggggtcaggctcctcttcccttccctcccaccagagagctttgctgagagcggcctgccttggttccttagcccaaaggtggagggtgctgggcgccagtcctgtgctcactaaaccatggagcttccctcacagccaactggccgctgcttcccagccccagcatgggctctcctgggctggctgtctcctccctccctgggcaggggtgctgtcctcttgccca

SEQ ID NO: 139606 - DNA, 1002 bp, Homo sapiens
gcgtcccctgccgccgcgtccccctcggccgggcgtccccggacgcccccgccccgcgcggtggtacggtccgggtttaaaaggctccggcggcccccgggccagcccagtgtgtgggcggcggcggcggcggctgcgcgcttggggcccggggcgcggggcgaggccgtggggacgtgcgagcggggccgcggtggggctcgggggcgcgtccacgtggccagagggcggccacccggagccagcggagggacaggtaggtggccgtcatcgtcgccgtccgtgcggggccaaacagctcggggcccggggctccggcagcccgggggtccggctcggcctgtgggggtcaggccctatccctgcccgtcggcgccggcctgcccgactccttgtgccccgcatggtggggacgccaacccaagaccaacaccctgcccaaagaggaccctttgtcgcaggggagcggcccctcggaggatcaacgctgtacttccctcccgctaagggctccgcgagtccgccgaggggtgccctgatggggcccgggcaaaccggaccagcagcacggtggggggtgtggggggcggccgctggacccccgtctctgcgtggggctgccccttcctcaggctctctgctggcccagctgtacctgtgatgcccgaggttgccacttacaggtgggggctgggcctgaaactgcctccccaggtctccctcccgacctgtccccagcctgttcctaggcttgtgttcccggggtgtagaggaggtgaagacaggatgtggcctctcttttctttggccttcctttcttctccggctgttgcatgaggggtccagctgacaaaagagccctggagaggtgatcaatctgagctgaaactttgcagtttcaagctgggcccgctgcttgttcctggcaaatgccttatttttcctttctctctcctgtgcctccttggtttggttccctgcaccaccccccgctcccccccc

SEQ ID NO: 139607 - DNA, 1068 bp, Homo sapiens
ctgctatcgtggggagggcactctggctctgccctggctgctgaacaaggagctgccctgcatcaacaccgtgagcccctcatcaccccacactggtcctctgccctgtcccaggtctaccatgcccagcgtgggctcacggccagtcatcctgtcccaggctttgccatggccctgggagtggcacctttgccctcccacctgtttctccctcccaggggtccctgccctctccttgcctctctctgggctgcccagtgccccacttctgcttccttccgttcccagctcgttcctccttgctccgtctcccggttgccccttgtcttgagccaacaagagtcttgtgggcccaggcttcgctcctcgctccctgctgtccctcctctgtctccctccgcagccaccaatttcctggagcaccctagggcgagcagtcagtcctggctggaggggaccgggttctagatcccgctctcttctgggactcaggaactgccggcctccatcttgcgcctgggagctttgactctcacgggttcctcctctgtttcaccagcccatgcagatcaacggcaacttctgtgggctggtgttgaaccagcctctgggaggcctgcatgtgatcgaggggctgcccctgctggccgacagcaccgacggcatggccagcgtggccgcctacacctaccgccagcactctgtggtcttcattggcacgcgcagcggcagcttgaagaaggtggcccccagagccctgggcatgtgggggtggggacagtctcagatatgggacaaggctggtggtgggaacacacgggagagctctgaggacaggacaggagaggacacggctggtgcagggagggagatttccctggctgggtcccaggcgcctggccctgctcctcgggtcgccccttggccgcccaccctcaccattgccagttcccactgtggactgaattgccagcttcgtatggctctggggacagagaacagacctattgtggagtctccctgccacgagagcaggcctggggctgagccagcattgctgggtcctct

SEQ ID NO: 139608 - DNA, 1966 bp, Homo sapiens
cagccacacccagccgtgcccttgcggcctccccccgccctcctccactttctccagctaatgagtggaacctccaccccgagtgacgtccctcgggccccaggggacgcggccaaggctcgctgttgcctggcactgtgagctggacaggcctgggccctcccggggcagtggcgggaccggctctggcccgaccccgtgcaggtgctgccgcgaaggggcctgtctgggcgcctctgccccacacggctttgctgaggagctgagcaagtgtgtccaggtgcgggtccggcccaacaatgtgtcagtgacgtcacctggggtgcaggtgagcagcttgggggtgcccggctgggtgtgcacatgtgtgctgggagtccgccctgccctgagccctctgcttcccccagctgaccgtcaccctgcacaacgtgccagacctcagtgcgggcgtgagctgcgccttcgaggcggcggcggagaacgaggcggtcctgctgccctccggtgaactgctctgcccctcaccctccctccaggagctccgagctcttaccagggggcatggtcagtgggttggggctgcccaggatggggcagagtggggcctctccctacccccagcgagttcacggccaccccgggactgctgcaggggccacccgcactgtgcggctgcagcttctctccaaggagacaggcgtgaggtttgccggtgctgactttgtcttctacaactgcagcgtcctccagtcgtgagtacctggccagcacccgtccctacccctggggatagaggggacctctgggacaggcgacaccttcagggcagctgtttctggggcatcaggggctaactgtcaggccctgatagcccctgacatccccacatctctctgtcccctgatatggctgccttcttccttcagttcccgatgtgtcctattggggagcagtgaggggcagtgcagcctcctctgttatttctgaagccacttcccccccaggtgcatgtcctgtgttggcagcccttacccctgccactggtgtaagtaccgccacacgtgtaccagccgcccccacgagtgctccttccaggagggcagggtccacagccctgaggtgaggcgggcgccgcatgtgaggggctgggctctgtggtgcgggcggggccaccggcttctatgcgttctcggtttctttgagccttctccaggttgggcctggagaagggtggccctgtgtgcagctgacaggtgctttccccgcagggctgccctgagatcctgcccagtggggacctcctgatccccgttggggtcatgcagcctcttaccttgcgggctaagaacctacctcagccgcagtcgggccagaagaactatgagtgcgtggtgcgggtgcaggggcggcagcagcgggtgcctgccgtgcgcttcaacagcagcagtgtgcagtgccagaacgcctcggtgaggtcccacccgctgcctcccttcggggtctgggctgtggcgtggtgtggatcgttcttgtctatgcccagctctctggcagggaactgtctgagtctcctgctagggattcctgtacctggaggaggggggcagctggcaaaaatcttgggtaggggttctgcacatcttatctggggtcccatgggttcctttcctccagtactcctatgaaggtgatgagcatggtgacaccgagctggacttctccgtggtctgggatggagacttccccatagacaagcctcccagcttccgaggtgaaggcatgggccagggagcttccctcctaaggcaattggcactgctggggtcgggtctgggggccctagtgctccccactttccacttttctgccactgcctgctccgtcagcagtgccttctgtgcctgcagccctcctgtacaagtgctgggcgcagcggcccagctgtggcctctgcctcaaggct

SEQ ID NO: 139609 - DNA, 1005 bp, Homo sapiens
tccccgcttcaactgtggctggtgcatctcagagcacaggtgccagctgcggacccactgcccggccccgaagaccaactggatgcacctgagccagaagggcacccggtgcagccacccccgcatcacgcaggtcagcctccctcaccgcccctgcccactgccaacagggcccctgggagtctgagccaactctctcactgcccatcctgctccacagatccaccctctcgtggggcccaaggaaggaggcacccgggtcaccatcgtgggtgacaacctgggcctcttgtcccgagaggtgggcctgcgggtggctggcgtgcgttgcaactccattccggccgagtacatcagtgctgagaggtgagtgcggctctgtgggtgcccgggccgtatgtggcctggccggccctgacgctctctgagccctaggatcgtgtgtgagatggaggagtcgctggtgcccagcccgccgccggggcccgtggagctgtgtgtgggtgactgttcagccgacttccgcacgcagtcggagcaggtctacagctttgtggtgcgtggctgccggccctaccccttcctgtcccttctctctcccgcaaggggcgtgtggagcagcccggcccggctcctcccctcagggcagcttctcccgcagaccccaacgtttgaccaagtgagtcccagccgtggcccggcgtccgggggcacacggcttaccatctcaggcagctctctggatgctggcagcagggtcacagtgactgtgagggacagcgagtgccagtttgtaaggtgggccggggccctgccagctttgggttgggcatcgtgtggggggccgtggggacgggtggctgagggccctgggccacccgctccaagcaccctgcttgccaatgtaggagagatgccaaggcgatcgtgtgcatctcacctctctccaccctgggccccagccaggcccccatcacacttgccattgaccgggctaacatctcc

SEQ ID NO: 139610 - DNA, 1086 bp, Homo sapiens
tgattacgcctgaccaggagacaggcaccaaattgtggcacctggtgaaaaaccacgaccatgccgaccatcgcgagggggaccgtggcagcaagatggtctccgagatctacctgacacggctgctggccaccaaggtatgggcctgcctctcgccaccttggcctccgcccagaggttgtcccggccttacaggggaggggccatggatcatttgcttccagtgggcctttcttcgggtctttgctgtgggaactctgagccttagataaaggccatgtctgtctgagagaccactggccctgtagggaagcccctctctttgccaagcctttctgcctccatctgtcctgctctggggacatcccgacctggctccctcatagcctgtgacctctctgccccacacagggcacactgcagaagttcgtggatgacctctttgagacagtgttcagcacagcccaccggggctcggccctgcccctggccatcaagtacatgttcgacttcctggatgagcaggcggaccagcgccagatcagcgaccccgatgtgcgccacacctggaagagcaactggtatcaccccgtgctgggctgccagcagcctgtctggagactggtgggcggaagacgctggtggctctgctgagacccagggcctggagtagcatccaggcaggagggaatgaggcctggcctggggttgacactgacggtgccatcaagccaaggggcctgttgcgtccagttctggagctggactgcctgggtgggtgggatggtggtggtgaggcctttgccctctggggtcttgcaccaggtagagatgctggtggtcggtcgcaggtggtgagagcggtgacaggagaagctgcggagggggttgagccctattgagaacagaagttcagcagagacttagaggaaaggccgttcaccctaaatgtgttgctctcaccacctctggacaagatgtgagccggccggacaggaaagagatgtgcacatgggaggggccccttggggctaactagggagcctcaggcgcacgtccctctgttgtccacagcctgccgctgcg

SEQ ID NO: 139611 - DNA, 1088 bp, Homo sapiens
tgcaactaaagaggagagaacggggggtctgggactgtcagacagggccagattcctcagaggaggcagaagacacagagtagtaaggcacggccgccttggccccacagggcgggcactggacggagcgggcgctgaatggggcggctgaaggagtcggagcaggtgcagacaacactgaggacgtttggcagtaggctcaggaggaggagtgttctagggcccccaggcccaagtcaggccctggcacaagcctgagtccagccctccaggtgctcagagagaatagggccccgagatgcttgagggggaccctgtggtccagcgtggcacagccacaattctgaggaagctttggaggcctcaccccaagtgctgctggtaccgtgaccccgccttggaatgggtggggtcagccatggcaagggtgaggtgccagaggccagaccgaggctgataatgctacacaaaggagcccagacgggtggcagggcccaggacagctcaagaagaggcaggtgagtgagggtggcgacatccggtggggggacacatatttacagatggagacagaggcgaagttcgattcaataaataggcagagggatataaatagcagggagggtgggactgtcccaacacctgggcacagggcaggagggtgggggtattgctgctgctggggtgggggctcgccctgtcacccctccccctgcagggcccaaagcaaggcactaatgaagggggcctgggtgtgccgggggcatcgtggccagggtgacctgccccacgatacccaatccagggctcagcccggggacccaggcttgagccagccactcccctggatgggaggacggcacaggactgagaagccccctcctcaccgattccaccaccttagctgtcgctggacacgaggctgatgatctgttccagtttctgccgcaacttatgcttccgacaagaggcatctcggtccagagccgtgagaatctgggggagaggagtcccctggagctgggctctgtagggggcgcagctcctgccatgcaaagtccccacttcccagctgggctcctccctcc

SEQ ID NO: 139612 - DNA, 1057 bp, Homo sapiens
tcgtggggcaggtcaccctggccacgatgcccccggcacacccaggcccccttcattagtgccttgctttgggccctgcagggggaggggtgacagggcgagcccccaccccagcagcagcaatacccccaccctcctgccctgtgcccaggtgttgggacagtcccaccctccctgctatttatatccctctgcctatttattgaatcgaacttcgcctctgtctccatctgtaaatatgtgtccccccaccggatgtcgccaccctcactcacctgcctcttcttgagctgtcctgggccctgccacccgtctgggctcctttgtgtagcattatcagcctcggtctggcctctggcacctcacccttgccatggctgaccccacccattccaaggcggggtcacggtaccagcagcacttggggtgaggcctccaaagcttcctcagaattgtggctgtgccacgctggaccacagggtccccctcaagcatctcggggccctattctctctgagcacctggagggctggactcaggcttgtgccagggcctgacttgggcctgggggccctagaacactcctcctcctgagcctactgccaaacgtcctcagtgttgtctgcacctgctccgactccttcagccgccccattcagcgcccgctccgtccagtgcccgccctgtggggccaaggcggccgtgccttactactctgtgtcttctgcctcctctgaggaatctggccctgtctgacagtcccagaccccccgttctctcctctttagttgcatgagtttttctttgttcatggaatgttttttcctgattaaatgttggggaaatgccatccatgtggggctctgtccttggggcaggtcagtagacctgtggatgctgcatgagctggagccccattgtgggagaaaggaccactccttgcagggtcccagagggtttggggaggttcagggccatacccgacccatcagcaaaccccggtggctctaccttcaagacagattcaaggtagatagattctcctcccttccaccac

SEQ ID NO: 139613 - DNA, 1970 bp, Homo sapiens
aattgggccggggggcggggccggggcgcggacggggcaggagggcggggccgggaagcgcgggcggcgggcgcgcccctctcgctgcttccggcggcggcgggcggttccagcgcgcgcccggggcggcggcgcgcggcggggggtggttggggtgcgcgccggcccgagtggacgccgtcgcgaccgccatgcagctgacggtgaaggcgctgcagggccgcgagtgcagcctgcaggtagggtccccgggccgggccgccgggtccggcgcgctctctcgcccgctcctggcagggggaccggcagggccgagggcgggcacggggaggccgggccgagggccgggagccgggagagctgccctcgggggcggacgcgtgggcttcgccgtctgggggccgcgggctcaacccttgcctcccaccctccgcgcggccaggtgccagaggacgagctggtgtccacgctgaagcagctggtctccgagaagctgaacgtcccagtgcgccagcagcggctgctgttcaagggcaaggccctggcaggtacccagggagaggagacgcccggggagccccgcaggaagcgggaccggggtgcgcgggccgaggccagcagccgtgtgtcgggtcggggtgcgggcgccaagcgccacatgaccccaagggaggcggccgcatgcctcacagccggatgccgcagcgctccgctcccgccgcccgaggcggcctcgcgccccgggccacccccacggcggtggaggaggaggaacccatcgatctgtctttggcagatgggaaacgactctcggattatagcatcgggcccaactccaagctcaacctagtggtcaaacccctggagaaggtgctactagaagaaggcgaggcccagaggctggccgactccccacccccgcaggtctggcagctgatctccaaagtcttggcccgccacttcagtgcggcagatgccagcagggtcctggaacagctacagagggtgagaagggtaaccctgggcatcctcttcaggcccagttgctcccagcccctacctctgttgcagtgtatgccccccccccactggcagcccctgaatcttcctgcccttctctccccaggattacgagaggtccctgagtcgcctgacgctggacgacatcgaacggttggccagccgcttcctgcaccctgaagtgactgagacaatggagaagggcttctccaaatagaattctcggagcatggggaggtgcccaacgccaggctaccgctgcatgtcgcactaagtgtgttctcctgttgcagttgggctcatcatcgtcatagctggcatgtacctggctctggccaggtgctaggcactcctcacagcttgacctgggtttgcttccacaccctcagaagaggagagccggcacagcagaggcaccggcgatgaagtggcacagccccagtcggaatccagcggcttctgaaagtgccttggtgtgagaaggaggaaggggccgcttggagagctgggctctcgcatgtcatgtttagcccactgagaatataccctcaggtgactccctcccgatcctgaaagggaaagcagctgtcacctgacttctggcgggtccaacatagccctcagcttacctctgcaggaggccgagtgacagccagccctggaaccccccgacccccgcagctgctgcagccagtgtgccagtgtgcgttcgacaaatggaaaagcagattggggccagggagtcagcaaggcaccccagctctgtgatgtgactttgggcgagtctcagtgccacttggtccccagccatggactctatacagtgagggccactcaccgacctgagtcagtgtcctctgtctcacagggcccctctcccttctgttcagtaaacaaactgaagccaaaaatgaagccgtggccaagcgtgacccagagatggggtgtcc

SEQ ID NO: 139614 - DNA, 1126 bp, Homo sapiens
ccttctgcagcaacagctgacaccccttcctcccatgctgcaggatgaatgaagagaccagaaagctcttcagtgagctgggcagcaggaacgccaaggagctggccttccgggacagctgggtgtttgtcggggccaagggtgtgcagaacaagagcccctttgagcaggtatggggggtgcctggcatcacccccaccggggcagcctgtcgccccttctgcctgcatgcgacgagcctccccagctgctcacgccccagcaggggaccgtccccagtccagctatgaggggtgggccagtgcagctgatgccatgtttccctgggatgggtggaggggccaagtgccctgagagtacaccgttggccaacacagcacagttgactgacagcctgggtcctggtccactcctgtcccctgtccctgagggccaaagtcatgactttctgctcccctccccacagcacgtgaagaacagtaagcacagcaacaagtacgaaggctggcccgaggcgctggagatggaaggctgtatcccgcggagaagcacggccagctagcacggccagtgccaggaccgggccgagggaggccagaccaagggaggcacgcgcgctgccgggcggacagaggctgaggctcacaccccacacccgggcaggagcgctccctggccccaacacatcggggctccgaggcagtgaccagaacgtggtctcaaggtggtgggggctatgggggctgcagggggtagccctgccgcactttgtcacgggagcccagggtacccgcctccttttcgtaacactgttccccccggtcagcccatctagccctgtcctccattcctcacgccatctccatccccatcttgagtcctggaacggccctgggtgcctgcccctcactgtgcaactctgggagcagcccggcaggttggggcgtcttccagaacctctcccttctggagccactctgcactgcgggctaaacatgtttccagtgtgattccttccagtgagccaaacccggtggctgcttcatgagcctgactgcctctcgcctgctctcagcaggaagggacccctggagcaggctggcccggggtggtgaagtagctggag

SEQ ID NO: 139615 - DNA, 1048 bp, Homo sapiens
tgaggtagttacgtcatgagggctctgccctcatgaatggatgaatgccattattatgggtgagttagttaccttgaagttcagcccccttttttcctgcgtctcatatgcttgcttccaccttccacctttctgccacgggatgaccctcaccagatgccggcgccatgcttttggacttcccagcctccagaaccatgagccaaatgaatctgttgtctttataaattacccagtctgtggtattctgttatggcagcagcaaatggactaagacaagcctctactgactacccagttccaaagccatttccacatttttaggtatttgttacctaagcaccacacttcctggtgccaaaacctgtatccatttcctggaactgccatttcaactgggtggcttaaacaacagaaatggattctctccccattctgaaagccagaagtctgaaatcaaagtgtcagcagggcgttactcaccctgaaagttctacaggagggtccttcctgacctccccaggttccagtggccccaggcataccttggcctctggctgtgtcactcctgtctcttcctccactgtaccatggctgtcttccctctgtgtgtctttgtcacttctgttcttataaggacatcagtcatgttgcattaaggacccaacctactccagtatgaccccatctgaactgcaaaggccctatttgcaaacatcacattctgaagtaccacagattagaacttcagcataccttgaggggacagaattcaacccataatagaagccatcctgctccagtcctcccaaccaacccccatcaaaatcgggagacaggctgcaccccctgccacactaccccctgccacactgcctttgctcaggttggcctcatccatgcagctagacccccagcctgacttacttcacccctgctttgttcctggctgtgcagtggcccaggccagccctcagcatcctttcttttctcccaccagtaacagaaaatccttctgtcttgggtccctgtggcctcaccagtagga

SEQ ID NO: 139616 - DNA, 1514 bp, Homo sapiens
ttcaaggagccctttggcactgagggtcgcgggggctatttcgatgaatttgggatcatccggtgagagctcttcctctctcctgggaggctggcacagggtggcagagccagtcaccctgcagggctactcttccctatcttgggggagctcctcctcaccctgcagttcaaaacctaagtgtctgagctatcagaccgggctggaaagggctggacccctacacagccaagcaccccacggttttatgattcagtgatagcatcaccatgtccttccttgatttaaggggacctggaagacaagggggatcaggaagtgagtcttgcagcttgtcactaggaagccttgtttggggtccccatgcccttgaaccaggtgaacagggcggggagctaaggcgagctctggcctcttccgtccccagggacgtgatgcagaaccacctactgcagatgctgtgtctggtggccatggagaagcccgcctccaccaactcagatgacgtccgtgatgagaaggtagggggtgcaccccagtccccaggagcatgccctgtcgcaggcccatctgtgacgaggcactgagctggggtgtgcatgcagagcaggtgtcctcaaccccggagaagtcaccacctctgagcacagcgtggcctcccggaggtgacctggactggcagtcatgaagcccaagttgtcatgtcccaggcctgacagtcactatgtgaccagggaaggccattgcctctctgggcctcagcttgttcatcagaatagactcgagatggaccagggtggtcctggagggtcctcagggaggggccctgagctgggcctctggcagggtgagcagagccaagcaggggcctcctcctgccctgagggctgcacatctgtggccacagtcatccctgcaccccaactcaacacccaaggagcccattctctcccttggctttctctcaggtcaaggtgttgaaatgcatctcagaggtgcaggccaacaatgtggtcctgggccagtacgtggggaaccccgatggagagggcgaggccaccaaagggtacctggacgaccccacggtgccccgcgggtccaccaccgccacttttgcagccgtcgtcctctatgtggagaatgagaggtgggatggtaggtgatgccttcgaggcccagcaaggcagaactgggcatgccctgtgtgcgggcactggagctcccactgagacactcacgcactggtccacaccctgagagagctggtgctgaggctgccctttccgccacgtaggggtgcccttcatcctgcgctgcggcaaggccctgaacgagcgcaaggccgaggtgaggctgcagttccatgatgtggccggcgacatcttccaccagcagtgcaagcgcaacgagctggtgatccgcgtgcagcccaacgaggccgtgtacaccaagatgatgaccaagaagccgggcatgttcttcaaccccgaggagtcggagctggacctgaccta

SEQ ID NO: 139617 - DNA, 1162 bp, Homo sapiens
ggttcccgggggagtggcgcggcagaaggccccgcccaggagccgagggacagcccagaggaggcgtggccacgctgccggcggaagtggagccctccgcgagcgcgcgaggccgccggggcaggcggggaaaccggacagtaggggcggggcctggccggcgatggggattcgggagcactacgcggagctgcacccgtgcccgccggaattggggatgcagagcagcggcagcgggtatggcaggcagccggcgggccggcctccagcgcaggtgcccgagaggcaggggctggcctgggatgcgcgcgcacctgccctcgccccgccccgcccgcacgaggggtggtggccgaggccccgccccgcacgcctcgcctgaggcgggtccgctcagcccaggcgcccgcccccgcccccgccgattaaatgggccggcggggctcagcccccggaaacggtcgtacacttcggggctgcgagcgcggagggcgacgacgacgaagcgcaggtaaccggccgggcgggcgccgcgcaggcggaggagcgtactgtcccgcgctgcgccgcgcggcggtaaaatacacgctgtttgttgtgcttgagaaccgagcagaatcgagagggtcttaaccaatccctttataccccgcacctcctctcttgagcccctgagaccccgagagcgaaggggacttgccgaccggggtcacccagcttggcaaggggagggctggagctgaactccagcatctgcaccatctcccatgctccaggtcattgtggagttcccgctacagtcgggaatgagatggtcctgggcacgcagttccatgccccacaaggattttactcggttgtccagaattgatgctgtagtcggaatacaccaatgctttgagtaattttgtaatgtacaccctgaatgaaggctgcctaggagagagtggctggagcccagagccagcagtttctaacccatcaaccactccccaatgcccagccgttcacaaggagtgatttgggcaatcaggtgtcaccctggtgtgagaccccagaggaactctcaagaaaggggctaacttctcaatgctctcctgttcttctgccttgttaacgagcctttcttccaccagacagcgtcatggcagagcaggtggcc

SEQ ID NO: 139618 - DNA, 1072 bp, Homo sapiens
ggccttgcctcttcctctccccgtggccctgaaccttgagaatgggtagacctgccttagacttgccttagacctgtgtcaggctgcagctgcgacagctcagggaagctgtggggagatggcaaccccaggatgttgctctcaggagtgtcagcaggccatcttaatggggggctgggccagagccttggggtgctccctctgtggggctggggacgtcttgtctccatggacattccctcttgccagccatcgccatctggcacctggctcagcttcccccaagccaaggtaagcccgacagcatttccaccccagtgttggctgggagccttttcctagtttgtcctcatcagacctaagctggggtgcagtttgctagtgatcacattttagcaggacaccgtcaatcgtaagtgtacccagaggagatttataaggacaaagcctgaagccaggtcacatggggaagagttagctacaaaactggccacttaatctctggaggggggcgttggtggggtgtgtctgtgtgtgtctcagggggctggagatgcctgcgtgggaggagtgcacctctgaccaggtggcagagtggaaggactgagggctctcagctgagctgtgcacatggcgggcacaggaccggctggctgtgagtgggtgtggcctgtggcctgtgaagggtgggaggagggctgtggagctggggattctgggaagggaatgtcggcccagctgggaggttgtaccagatgacctcagcggcctcttcagtcctgaaaaaaacctcagcatctcctctgtcgttttgggccgtgacaggacgcagccatctccctgtgcacgctgagatcctgcaatgggccctcaaatcaggggctggcatcacccagcctggtcagccagggccactctttcatccttctcagttcttctcagccagcctcgccctgggctgacgaggctccgtcagctccccttgcccgtccttagggaatgcagctggaagatctcaaacagcagctccagcaggccgaggaggccctggtggccaaacaggaggtgatcg

SEQ ID NO: 139619 - DNA, 1030 bp, Homo sapiens
aggccgagcagcacaagattgtgatggagaccgttccggtgctgaaggcccaggtgagggccctcctctctgacccaccctggcactgggacctggagagtctctttggcgtctttttttttttttttgcttttgctttttgagattgagttttgctcttgttgcccaggctggagtgccactagtggcacgatcttggctcactgcaacctctgcctcccgggttcaaacaattctcttgcctcagcctcctgagtagctgggattacaggcgcctgccgccatgcccgtctaatttttgtatttttagtagagacagggtttcaccatgttggcccagctggtctcgaacttctggcctcaggtgatctgcccaccgcagtctctcaaagttctgggattacaggcgtgagccaccgcacccggcctctttggcatcattttgtagtggcctttcgtaagcttctgagccacttgtgctgctccttagacctctcggtgagcttggcattactcgccgacgtatctgtttcctctgcgccgctgggggctctgggaggacagcagtgggttctgctttgttcctgtggtgcctggcgcagtgcctggtgggtggctggcttgtggcgggcacatccctttctgttggatttgccaggcggatatctacaaggcggacttccaggctgagaggcaggcccgggagaagctggccgagaagaaggagctcctgcaggagcagctggagcagctgcagagggagtacagcaaactgaaggccagctgtcaggagtcggccaggtgggcctctgagagcgtgcccgtgtgagcagtgggtgcgacactggggggtcgccagtggtgaccccgcagtgggtgcgacactggggggttgccagtggtgaccacaggagacggatggctcctggtgttctgggttagggctcactgtggtccctctcctctcacctgagcttccaagagctgctttgacactagtccagccaaggagctttacagaaatgcgtgg

SEQ ID NO: 139620 - DNA, 1226 bp, Homo sapiens
gaggctaagggaggcatgccgtggtagcggcggctcctggtcttacatgagtggcctgtgagaccaggcctgccattgacagtcctgccaagtctccgtccccctccatcctccccttccctctgactcttctcttttcccagcctacctctcctctcccctggccctgcccagccagaggaggagcccccccgaggagccacctgacttctgctgtcccaagtgccagtatcaggcccctgatatggacaccctgcagatacatgtcatggagtgcattgagtagggccggccagtgcaaggccactgcctgccgaggacgtgcccgggaccgtgcagtctgcgctttcctctcccgcctgcctagcccaggatgaagggctgggtggccacaactgggatgccacctggagccccacccaggagctggccgcggcaccttacgcttcagctgttgatccgctggtcccctcttttggggtagatgcggccccgatcaggcctgactcgctgctctttttgttcccttctgtctgctcgaaccacttgcctcgggctaatccctccctcttcctccacccggcactggggaagtcaagaatggggcctggggctctcagggagaactgcttcccctggcagagctgggtggcagctcttcctcccaccggacaccgacccgcccgctgctgtgccctgggagtgctgccctcttaccatgcacacgggtgctctccttttgggctgcatgctattccattttgcagccagaccgatgtgtatttaaccagtcactattgatggacatttgggttgtttcccatctttttgttaccataaataatggcatagtaaaaatccttgtgcattagtcgtgcgtatctttggcatagattctgagaagtgacaccactgagcatgggcgatggcgtagatggtacctgagcccccttcctccttggagcttggtttcccatctctccccaccccctatttccctagccttgccaaggaggaggtgggaaagcccgtttgggtttttgtcattcgctaggccatgcagttctctgttaagagtgagcttaaacatctttcctgaggctttaaggaccttttttagttctgcttctgaatgggctgctcatatcatatatatatatgtatatgtatagttgtgtatatgtatgtgtgtgtgtgtgtgtgtgtgtgtattttttttttttttt

SEQ ID NO: 139621 - DNA, 1077 bp, Homo sapiens
tcgaagtttttttttctttatgtagtcacatttatccattttttcccccttttactgctttgactttggagtcgtcgtgaccaccttgtggtctgtgggagggatgcttcacacatgagcacttttctttttctaacaccgaagcgtgctcttgtcttcaccaagagtgttgttgcccagtgtgactggtgatggctgtttcatcatattccagaagtttgtgatgccatttcccacactggccccaattaggaagaacagacgactctacttgttttgcaagattctggaaatttcccggggtgtcagagccctgggcattaaccctgcaattgtagcaaaggaaacaaagttggaagttgactccccagcacccaggccttccttcctgccctcctccaagctgccctggttgggaacgggatattgtgaatccaccctgaggcttcctcacagggcttcctgctatttgacagtgtgaggctggctagaattgggatatgaggccttctaaaaattaacctggcctgagggctttctcagcatctgggggcggggtgtgggggcggggagtgacctttcccctccttcaagccaggtgcccatcagattctacttgggaaaatgtgaaaggcacagacagcttgtctgctcacgggtgctgcacttaaatcctaatcttgcaatttttctacaagagcactttacattttttttttggagggagggtgtatgagtagacggtggctgctgtaacaaaggactgcacacttggggcttaaaacaacagaaactccttcacagtgttggaagccacagtctgcaatcaagttgtcagcaaggctggtttcttttttctttctctttctttctttctttctctttctttctttctttctttctctttctttctttctctttctttctttttctttctctttctctttctttctttctttcttttttctttcttttctttctccctctctctctccctctctctctcctctctctctttctctctttctttcttgttggatacagtcttgctctgacacccaggctggagtgcagtgg

SEQ ID NO: 139622 - DNA, 1697 bp, Homo sapiens
cccgatctgttccttcacgaaaatgagcccagtagcccgtccaagccagaaatggacttttagcccccaccccctgccaactctgccctttccctcatccccagttgcttaaaccaaaacggattcctcttcctctcatgatccaaactcctgagtcccttcaccttttgcctacactatcacagtgacctccttgctgctttcacactggagagcgtgggctccctgtgatctactctccacatggcagccagtgtcatctggtaaacctttgctgaaaccctgccatgcccttcagttgccctggaaacctgaactcatcctcagcctggctcgcagagccctcatgccgctgggacgtcacgttatgtccctctcctgctggcccgctgcacccagccgcaccacatgccggccgcacctcacacacgctggcctcttggcccttcctcgaacacacggcgcttgtccttgttgtcccctcatctttgcatggccgatttctttttctcattcagctctaagtttaaactttcaacagttctaagcgtatcaccttcttcatcttaaagtcctcatcctaaatcacactgcactgttttaactcccagcttggcagtccaaacggcctcatttattctgctttgttttctctctccttccaccagagggagagcagaggcctcctccagctcagtcaggcaccatcccccggaacagcggtctccaacctttttggcaccagggaccggttttgtggaagacgagttttccacagacggggatggggcgtgggatgacggttcggggatgaaactcttccacttcagatcatcaggcattagtcagatgctcctaaggagcacacaacctagatgatccctcgcacacacagttcacaatagggtttgcgctcctgtgagagtctgaggccgctggctgatctgacaggaggcagagctcaggcggtcatgcgagcaatggggagcagctgtacacacagatgaagcttcgctcgcgtgcccaccactcgccgcctgctctgtggctcagttcttaacaggccacagaccagtatcggtccgtggccggggggttggggacccctgccctagaacgatgctcggcacagctacactcggtgcacatttcttggtggcctgagcttgtcttgagctccatcaggatttctctgtcaatatttttgtagaccataccctgtcaccataaatggtgcttggtagaaatgactgtatgcatgtgatagggataacacagaaaacccatggtagagagcatggcgactaacttggagggacttctttttgtctttttttttttttttttttttttcgtttttgcagagatgcaggtattgtcatgttgcctgggctggtctcaaactcctgggttcaagcaatcctcccacctgtgcctccctaagtgttgggattacaggcatgagccgctgcctccccgcagcatggggggacttcttataagcatttttatttatttatttggaattcggatggatagatcatgttggcctgataatgtatgtgcaagagcacagactctggggtctcatggacaagccccactctgccccttgcttaatgtctctgagcctcagtttcctcatctgtaacaagggcagaaatgccatccgtgtgcagcagagtaccgacgaaagg

SEQ ID NO: 139623 - DNA, 1066 bp, Homo sapiens
gggacaataatcactctcaccagaaaagtagtttaaatcagaggtgtctctttacagcctcagagattttcaggatgtttctcagttcatttctgtgtcttttgacaatggatacaatccaggcgggccacttcaattttattggagtgaattctggagccaaagaagtgaaacttgctataacccagccaggtttattttactgtgcaagtagaattgagtgcaggaggaacgtgtccaaacttctaagccttgttcgttgttcagtttaatcctgaacaacatgctgcaatatctggatagagtatttgctggttttgagttaaaactctggtatgatgccttgcctgacagcctaagttccagcttggagactgtgtctatctggttcactgttacatctccagctcctagcacataaatatgtgatgagtacattctggtgattaggtttgctataaactacaatactagtcttgttcctcaagagtagtgttttaaacctaggtctatgatatcatgaaatcacatgtacaattcattcattcaacaagtatttactgagcaactatcctgtgccaggcactactaggcccagaggataaaacagtgatcaagacagacaaagtctctactgtccgggagctcacattctagtgctggaggcagagaatgactgtggctggccacttcaatatggatgatcagagagggtctctctgagagatgacaattaagttcaggtgtcaataacaggaagcagagatctgcatggcagccatgcaaggatctgtgtgacagagtattccatggagaaggaacaagtaaggcaaagcccccaagatggagaggagattctacatgttcaggaacagcaaaaagaccagtgtggaagagcaagagagtggctgagatgtgaagtgggagagacaggcagagccagttcatgtgggacgttctaggctatgtgaaagagtttgggttttgttattaatttattgggaagcctttggagggtgctaaccaagggaacaacatgatctgatttatgattttaaaatgttat

SEQ ID NO: 139624 - DNA, 1598 bp, Homo sapiens
ctttcaacctctccgagcttcaacatgttcacttatgcatcaggactgatccaacagcaacctgaaagggtcggtgtgagaaagcaaagaaagaggtactgtttacggagcgttcagccgtgagcccaggcgcaggcgcggagctaaacccggaggtgaagcaactacagctggggccacgcccacagactccgggctgtcggggcgggcggcactcgcgcttccagcctgggccaaccaggctgcttgaggctcgaagcgcatgcgcggtctcgccctccgtactggccgagccagcaaatcgcattgcgcagacgaccagcgggcgcctcggattccgcccccgggatggccccgcctcctcccgccccgcggcaaggcacgcacagggcagtgcgcgggtgggtgggtcctagcagcgcggcctgacgggaccaaggcggcgggagtctgcggtcgttccctcggctgtggaccgggcggcacgcacgcggtgcagggtaacatggcggatgcggaaggtaagggctgcaggcttccgggccgtgctaactccgggcgactcggggaacgggggtggggggatggtatcggggcccgcgcacgcctccctctggttcccgccggcgtgtcggcctcttcaccgcccggccttaagccggccttgtctctcggccctggctccgtggcaagggcgcgagagtgggagcccctcgcggtgacttggcatgatggggctcggccctctcacctccctggggtccgggtcgccgtcgaaagacatctgccgtgctgcccaccccgcggtggcgtgggacgtggcagtgtctgtgctgctgccagcccggacgccgccgttacagctccatgcgactaggggagcaagggtagtggaaacgggccgagaagaaaaggagcggagggaccccggagcagggatagagctccgagttgcaagaaagttctagaggccacaagcccgcggggacagtcgagtggtcgcttatggaactttccggccccctgcgtgagcgcttctgtgggatgtttaagctctgccatagccacgtggtgaaccggaagggaagccgacacgtgcagtagcctacagtcagttacccagccatgggacccatacatttggccttacacaccttgttttctcgcttacctacggatatacgttctaagaaatgggtcgttaggcgatttcatcattgtgtgaacatcagagggctcttacacaaacctaggtggcataggctactacacacctaggctgtatatggtgtagcgtatggctcctaggcttcaaacctggacagcatggtattgtgcggaatgctgtaggcagttgggacacagcgtcgagagtttgtgtacttaaacatgtctaagcagaaaaaggacagtaaaaatatagcacagggccgggcgcggtggctcaggcctgtgatcccagcccaggctggcggatcacctgcggtcaggagttcaagaccagcctggccaacatggtgaaaccccgtctctactaaaaatacaaaaaatttaggtgggcgtggtggtatacgcctgtaatcccagctactcgggag

SEQ ID NO: 139625 - DNA, 5410 bp, Homo sapiens
tactggagactttataatctgtacacctaggctacactaaatttataaaaatatatttttcttcagaataaatcaaccttagcttactgtaactttataaactttttacttcgactgttgtaataatacttagcttaaaacaaacacattatttagctgtacgtaaatattttctctgcttatctccttatttataagttttctattttaaaattttttaatttttttcttaaaaaatttttttttgttaactaagacacaaacacagcacacacagtagccttgacctacacagggtcaggatcatcaagacatcactaggagataggaatttttcagctctgttataatcttatgggggccaccatcacatacgcagtctgtacttgcaaaacattatgtggcatgtgactgtaattgtagacctaaaatccatttcctacctgccctaatttcggtctttattttaaacccttgtttcatttattcttggggaaaattcccaaatcctgtgtttgtttttttagtaattattttgccaaagaaacataagaagaaaaaggagcggaagtcattgccagaagaagatgtagccgtgagtagtaatgtgtttgacttcactttgactaaaaagaaagtttacttaaataacaaactaaaggaaagaagtgtttttaaaggtttccaaggaatgggccagcattggtagtcattgtgtagattcgaaaaagcactgaaatgacacagccccagacagtccaagtgtccttcaggcatagcttactaaatggtgctggccttaccaactgctgtctctgaatttgtcttccttatgccacccacagacccgccatccccctttctctttaaatgtttggacccatcttagtgacatttcacttcccctctgtactcctggttcatttcttctctctctttcccttggaggtcccagtgaaaaggcataggaagccttgttttctgtttaaaaggcatacatttccatggcagtaatggaattgttcaaaatcgggtgggaagtttaataggttatatttctgtcctgtcgaaggaaatacaacacgctgaagaatttcttatcaaacctgaatccaaagttgctaagttggacacgtctcagtggccccttttgctaaaggtatgtggttaaaatcgtgcatcagatgaatgcctgcttttacgttatttccaagtgttaaacaattgattgagaatgcttactgctggcatccttgactttgggaagtgcccactgatacagtttaaagcaggattccttaaggtatctgaaatgagaaccaagtttttaaaaaattggcagtgcactcaacactgttgtagaacacatgtccccacaatgttaaattgctgagtttgtcaacagttctcagtttttgtacttagtccatcttgcagacctatgccagtttgtgggccacatagtggtactgactctttttttacatgtgctcacgacatggtattttgttttgtgttgtgtcgttgctttgtagaattttgataagctgaatgtaaggacaacacactatacacctcttgcatgtggttcaaatcctctgaagagagagattggggactatatcaggtaagtgttgggaggaggcactgtgcaaacttactttcttttgaaaatgctttcacatcagctattcaggaaggcagtggcatgccagaatagctttgtcttgaatatataacctgtacccgcagtgaattatttttctttttaacttttcagatttgttgtttcactggagcattaagagtgggtgatacattaattttttttttttccattccaggacaggtttcattaatcttgacaagccctctaacccctcttcccatgaggtggtagcctggattcgacggatacttcgggtggagaagacagggcacagtggtacgctggatcccaaggtgactggttgtttaatcgtgtgcatagaacgagccactcgcttggtgaagtcacaacagagtgcaggtatgtgggagagggagggaaggactggctagagtgaaaagctttctgtatttcccttctatgttttgtctgctggaaactatttcttcattaagaaaaaaaaaaatcctaaagcaaggatattgttttggtttctgtgtacgttctgtcccctgccagatcttggtggtccgcgctttttggaattccacatactaagcatgtattcatcaagctgactggatccatttgtccgggttcagctctcagcttgtcactccaggcttctcactctgtgctaccgcttctgcctaaagtatccttcgttcatttttatctgagaaaagcctgcttatcttgcaaggctttttccacgcagcttctacactgagtactcccaactgtccctgttagtacattgaattcccagtgagaaagtgtcttcattctttcccacatcatcaccatgaaatctctcttaatgcaaattttatagaaacacaaggtcaaactgccgcttttcctgctgtgcaaaatgggagtgactgagcatataagaaatatggaaaacagaaaactcagtggccacacctgactactcttttgtcatttttcaggcaaagagtatgtggggattgtccggctgcacaatgctattgaaggggggacccagctttctagggtaagtctgcaattgtagggaggacaccctttgttgacttggatctctgagcccctaaacatctggagatgggttagctgtcctgactgactccttttgtccccttttcagtcggctgctgcagccagcctggaccagtgactgcacatgtacattctgatgaggtgtttgttttcatttgtgtttgttcttaggccctagaaactctgacaggtgccttattccagcgacccccacttattgctgcagtaaagaggcagctccgagtgaggaccatctacgagagcaaaatgattgaatacgatcctgaaagaagattaggtgagtcattaggcctgtgagtgggtatgaacacattcttcaggattctgttctcttattaaaagtagatgcccttgaagttgaagactttctaaaacctgccctacagctgggatattgtctgtgggcgatagtttttgttatcttttgttgaaaaagtgaacagtgcctagtaaagtgagatggcttttacaccttttatgatgactgcttctgctggagttgaaatgttttcattctgcatttgtgtagttcggtgctttgttcaaaggtaagtgttttcaccaaagtatgttttgcatgtgttttttatttgttgcaattttgactgcttagaagtttctgttgtcagaagtaaatttaagacaatgccaattttcctcccatccatgaaacataccatgctgaatatacctgcaacttaagtgttaaaaattctgctaatatcagaattacagatctttttttttttttttttttttttttgagacggagtctcgctctgtcgcccaggctggagtgcggtggcatgatctcggctcactgcaaactctgtctcccgggttcacaccattttcctgcctcagcctcccaagtagctgggactataggcgcccgccatcatgcccggctaattttttgtacatttagtagagacggggtttcaccatgttagccaggatggtcttgatctcctgacgtcgtgatccacccgcctctgcctcccaaagtgctggaattacaggcgtgagccaccgtgcctggccagaattacagatctttacagcaaatgcttatattttaagaagtgtgtctgtcacctctagtcttggtggctcagatgaaggataactgcatttctcaaccagtgatgtatttacagtaggtgctgcttttcttttgtgtgtgtgtatcttaggaatcttttgggtgagttgtgaggctggcacctacattcggacattatgtgtgcaccttggtttgttattgggagttggtggtcagatgcaggagcttcggagggttcgttctggagtcatgagtgaaaaggtatgtgttacggggctagaagttttagagctggttcttaccatctgccagcctttgatggcactccacttgcttcatgtcgtgggaaagatgctttccaaagtgttgagttcagtccagggcagcttccctgttctgttaattaaactttgggacattaaaatgggctaagggagatgattgggtagaaagtattattctattcatttgcctcccagcctacaaaaatgcctgcttggggtctaatacttcaacggttaaagatgcctggaagagggcgcggtggctcacgcctgtaatcccagcactttgggaggccgaggcgggtggatcatgaggtcaggagatcgagaccatcctggctaacaaggtgaaaccccgtctctactaaaaatacaaaaaaaattagccgggcgcggtggcgggcgcctgtagtcccagctactcgggaggctgaggcaggagaatggcgtgaacccgggaagcggagcttgcagtgagccgagattgcgccactgcagtccgcagtcccacctgggcgacagagcgagactccgtctcaaaaaaaaaaaaaaaaaaaaaaaaaagatgcctggaagagccaggactgaagaggctgaagacataatgagcttggactagtaaacaagtgacattcagttttaggaagtttggggtctgatgggctgagatacaaataaactgaattattttcatacatggctgcttttcaggaccacatggtgacaatgcatgatgtgcttgatgctcagtggctgtatgataaccacaaggatgagagttacctgcggcgagttgtttaccctttggaaaagctgttgacatctcataaacggctggttatgaaagacagtgcagtaagttccgggttaggagtttatatttggaaagaacgtactccaaagatgaggcttgctctttttattgttttccttgggttttattttatttttttcaagtccaaaccaagtatattaatttaaagtaaaagtttaatggtaggcatacttaaaaataaggcacattaggccaggcacagtggctgatgcctataatcctagcactttggcaggctgaggcaagaggatcacttgagtccaggaaggagtttgagaccagcttgagcccaggagatcaaggctgtgagctgtgtttttatgatgatcagagagttggccttttataaattaaaacattgtctttttctctaacttgagggataaaaatttctggatatttaaaatgtttgtagttggtaattatttatattcaaatcttgtatagatgttcacattttttgtatgtgtataggctgtaataaatactga

SEQ ID NO: 139626 - DNA, 1086 bp, Homo sapiens
actttttcatatgcctgtttgccatttatttgtcttcttttgagaagtgtctgttcaaatcttttgcctgttttttgatcagattattagattttttttcctatagtgctgagttccttatatattctggttattaatcccttgtcagatgggtagtttgcggatattttctcccattcttatgcatatggatatctagttttcccagcaccatttattgaagagactggtttttacccagtgtatgttcttggcacctttgtcaaaaatgagttaaatgtaggtgtgtgcatttgtttctgggttccttattctgttccattggtttatgtgcctgtttttatgccagtaccatactgttttggttactgtagctctatactataatttgaagtcaggtaatgtgattcctccaggtttgttctttttgcttaggatagctttggctattttgagtcttttgtggttccatgtaaagtaccagtgttttttaacttgtgaaagcttagctactgttggattgtctcttaagactttaaatgctctgcgcaccctcttagtgaatgaaccttagagctattcatttaatgggtctaatttgtaccagaagtaagcatgtcatcaggattccttagctctgtgagcaggcaaggcagccacggcttatggacagcagcagaaaaggaatccttaaaacttcaaaggttctgtggccccaaagggagtgtgcatgccgttcttatagacgtcttgagctgcaagcctgttatgtgtatcgttaggtgctttggttaggtgttttttaacttcagaagtttaacgtcatttcaaaggcctccttctcataatggagtatttcctccatatgcacatcctgagcaaaggtaaccccaattaaagtagtagctcagagttttaaaagttttaaagtggcatacaacagtagaattggggctcatcaattatcaattctttcacccttcaaataattcttttctttattcaatgcctgtagctattgcattaatgaccacagcggtcatctctacctgcgaccatggtatagtagccaagatcaagagagtg

SEQ ID NO: 139627 - DNA, 2213 bp, Homo sapiens
agcatgctgccttcaagcatctgtttaacaaagcacatcttgcaccgcccttaatccatttaaccctgagtggacacagcacatgtttcagagagcacagggttgggggtaaggtcacagatcaacaggatcccaaggcagaagagtttttcttagtgcagaacaaaatgaaaagtctcccatgtctacttctctccacacagacacggcaaccatccgatttctcaatcttttccccacctttcccgcctttctattccacaaaaccgccattgccatcctggcccgttctcaatgagctgttgggcacacctcccagacggggtggcggccgggcagaggggctcctcacttcccagtaggggcggccgggcagaggcgcccctcacctcccggacggggcggctggccgggcgggggggctgacccccccccacctccctcccggatggggcggctcctgccaggttcttttgtttggcattgttgaatacttgggcagctcttggtgtgtttcaccaccacagccttgtattgtgctgggctctgggttgtcgatgagtggaaacaggccctgtcttgggccttagagatttcagtctaatgaggggaaacagttgggcattactcacgtaatcacacagtggaatggcgaatttcatgcacgttagtggctaccaaggagtgcagagaggtgtctgtcacctggagtgtccacagtggtcaaggagtctggtcaagggattgtctgttaagccacaccggtgtgaagagtgggttaggtgttggtgaagtgaagaggggaggggagagttcagggcattgggagcaagcagcatgtgcaaaggcaaaaaagtagagtggctgcggtggggacgttatgtctgcagaggctctcactaataagctttgtgatcttcaacaagtcctgtgtgtgttggagttagtgggcaaattctgaatgctctggagaggagtttgaggccctgctgagaatacaccagggaggaaccttgttctattctttgtagtcaccatgcccgcttccagcattgacaccattctaatgttgacaccttgatgttccaccaggcaagtcagaagaagctgatgatcaagcagggccttctggacaagcatgggaagcccacagacagcacacctgccacctggaagcaggagtatgttgactacaggtgagggcaggatgtttcagagccggggtgggtagagacggcacacttgctgccttgatgcaggagtatgtcaacaacaggtgaggatgggaaggtagagcccacttgccatctggacgcaggagtacatggacaacaggtgaggaacaggtgagcatggaggttgtagagcccaggggagggggagtcacttggtttggggcaaacttgctaaatgcaggaccacaggaaccagctcttcagctcccgtgagattttggctgcccaggccagttaggggtgtgggcctgcacggcagacagttatccctttctagtctggctcgtgggactctagagggagtcagtctgcaacagtaagtggtgagttcttctgtccagcgtcagtattttgatggtggctttagacttgccagataacactacataacatcagtactgccctggaaagccattcagtgaatttgacctattgctacctctttttcagtgagtctgccaaaaaagaggtggttgctgaagtggtaaaagccccgcaggtagttgccgaagcagcaaaaactgcgaaggtgagtggcatgctgtcctcagtttggaatgtgcttagggagataatcctaagaggcactggcattcgtcttactttgtgactgtccgcagtccagccatatacgctagcatcagaggtgcagcgcatacacaggtaatgctgcctcataccctggggtgcttgtttgggctctgcaggctcctctgatttgtattctctgtcctatctgctgggaggaggaatgtgggctcaggaatcagatgggcctcgactcctacctcagctatggcagcaacacagtgatggaatgggtggtggtgtgtgtgtcaattctggcccccgccctgggtcaaatggtaggacagatgtgttgaaatcagaggccatggctgttggacattcgaggccatacaaaattcagcagagagcagaattgcatcttaacctggcaccacccagtgttgaaag

SEQ ID NO: 139628 - DNA, 4336 bp, Homo sapiens
ctgcactcagaaaccgggggcggtactgagtatcctgcacaggctgtgtgggaggagcttctgacttgtcagatgtgaattcctgctttgcctgctttctgtgagaggtccttgcagtcatgagagaaacagctcctccgggcctttccaccccaagccccgtgctgctgctgtgctccttctcttgtgcctgcctcaaggcttcttggatttgggggatgagactgtcttcaaatcctcagtaaactaaggccctgtccgggtttgtagtcagaaaacgtcctgttagattcagttgggatctttcttggtgccttgctaccttttgactcactgaacctttcttgtccattattgcccaagatctaacacttaaccaattgctttcatctcagcggaagcgagagagtgagagtgaaagtgacgagactcctccagcagctcctcagttgatcaagaaggaaaagaagaagagtaagaaggacaagaaggccaaagctggtctggagagcggggccgagcctggagatggggtgtgtggaaacacgttcaggttccttgggctggcttagtccctgcgtggggaaagaattacccaggtggtaccagctttgttactcttcttggaggagctgtggcctgggggtgggatgccaccgagtgcctttagtgcttccccatgttcctggagtgcttttgccctccctgtggaatggacagatagaggcacccgacctctaccacttatacttagagctctattgatggtgggtggagaggatgtgtaggatggtgatctgaatgtttccacttccaaaagtagaccactagggtgtcactgaaaggtttacagaactttgtgtcacatgcagcatttaacccaaaatatccttacaggtcctgaaaaaggcttgcttgactgtggacctttaccagatttccttctgggagagtcatagctttgttagtggatggtatctgtgagctttcattctctttctttctaggacagtgataccaccaagaagaagaagaagaagaagaaagcaaaagaggtagaattggtttctgagtagtgaaggccacttgaagctggaggagaaactaaagccttattgagaaaacatgttatagatccttttgttgctgagagagtggaacataggtcctagacagggtgaagagttctggcacattttagctgctactttgagacctcggtgatgttacctggtgtggtcatcccatcttgtcctgttttaaggatatgggtggtgaaagatgaaagaggcagagtttatcccaatgacttctctgtttgagttgggaagcctcaccttcagacccagtaactgtccgcagctgtctgctagtggttgtcttaacatcgtagtcctagtttgcattttttaaatcccctctgtttaaaaggtttgtaaaacaaaaacaaaaaactaagtctgctcagtgaaatgctgtagaaccctaaataagtggtagaagagtgtcactgaattttgtctctgaattcagtataactgagttttgtccatgctggtgtctgggttataggcctgatgggcctggtagttttccatcttgttctggcctagaggtcagtcctttgcacttcctcaaagcttgtgtacagtgctcacctaaatccatctgactacttgttcctgtgccctcttgttttaggcctcgtttacttttaaaaaatgaaattgttcattgctgggagaagaatgttgtaatttttacttattaaagtcaacttgttaagttttttatgtattcctgttgggttttcttgttgatctcatgctagcagagcaaaaattgtaaaatattttgattaaaaatctagggacctttatgtcctatttgaaatgtgatgcttttatgtttgttttctggtttttacatttttgttctgtatcttacacaatccaccttgggccctgtcatctgatgtgagatcaagtactcagaggcagtgattaccacaaaaccactgatctctagaagaacagagaaggagagggttaatgtatttatacatagtgggcctggcaggagcggggggcagggtgagtcgggagaacgaagctgagggtggggacatgcaggaatctgaaggccttggtgacagattagtggaagaaaggtctagggttgcttccgatttggtattaagaaccaagaaagaggccgggtgcaatggctcacacctataatcccagtgctttgggaggctgaggcgggcagatcacccgaggtcaggagtctgagaccagcctgggccaacatggcaaaacccatctctactacaaatacaaaaattagccaggtgtggtggcgtgtgcctgtaatcccagctactcgggaggctgaggcaggagaatcccctggaacctgggaggtggaggttgcagtgagccgagatcctgccactgcactccagcctggcaaaacagactgtctcaaaaaaaaaaaaaaaaaaaaaaaaaaaaaagcgctcttggatgcagcgaggcgaggccctgagctgtagccatatcatgagccaggcatgcagggtgggccccagccctggctcagcgaccggcctccactgtaccacgggaccccaggcttggattttctctcgttctaaatatgtgcccacaatgagcgctccactagctacaacaaccttaagggtgtttttctacatgggcactagccagtagagccctgcagtgggggcagagaatggggactcttccagggcaccagtgtttatcatctgaacacaagagaggcatcttgtgttaatgctgttgtccaggagcttaagtgaaatgggccacatttctttttgtgtggaaacccagagttacaaggtcattggcatttcaacacagcatttttattgcttttgaaggtttccctagagcagacatcattctattgcacagatgtgtcattttggcattatagaaagttgcagttaaaaacgctttctccaaaataaaaagacaaatgaaatacccagcatatacagttgaaggcaaaggagggcaggctttagagggatggggtccattgcttttgctgtgcatcacccttgattagcagttacattttggtagtacttcttacccccaatttctagaaatccttttcaaatccagatcagtggggccccatctatcaggagaatcaacccttcaggagcctgagcaagaagactgaaccttactggctgaattaggatagctgcagagagctggaagctgacacaaaactagttggagcagccctgtttgtcttaaagcaaggcgggtggaattccaaatgctggagaggggcatacagtgggttcccccattctacaagcttagtaaacccaggagacaggcacccactgtggagaactgcacgcttggtcgaaggcttcttgtaatttcttaagggtttcatcaacaccattattgaccagtgagaggtcaaagtagtgagcgtactggctgcggatggcctcagagtccttctgcagctgctgcagggcttctgtctgcaaagaagaaagccacagatgaagcaagctgcaccacccccagcccagagaggccagtgacagattttaaacagcaattgttagcgttgctcagctgtgcatcatacttgacgagtcaaattcagaagacattgtgaaagaatgttaatgtagggcatgaagaggcaatctcaaaagaccatggcaattctcagaggatctcaagctaaccctgactaatcagagtcctctggaggaccaatagctatgcagagacagcatggacttcaccagcatctcccacttaatgccctttgaacatggaagagccatttcaacaaccaccagagctgcaatcctaaaacgaagataaaggtgattttgttgttttgttttgttttgagacagtgtcttgctctgtggcccaggctggagtgcagtggcacaatctcggctcactgcaacctccgcctcccgggttcaagcaattctcgtgtctcagcctcccgagtagctgggattacaggcatgcgccaccacatctggctaatttttgtatttttagtagagacagggttttgccatgttggccaggctggtctggaactttagacctcaggtgatccgcccgcctcggcctctcaaagtgctgggattacaggtgtgagccactgcacccagtcagataaaggtgacttctaatcccagatcacacctgtaatcccagcactttggaaggccaaggcaggatgattgcttgagcacaggagttcaagaccagcctggcaacac

SEQ ID NO: 139629 - DNA, 1033 bp, Homo sapiens
tcactggtcaataatggtgttgatgaaacccttaagaaattacaagaagccttcgaccaagcgtgcagttctccacagtgggtgcctgtctcctgggtttactaagcttgtagaatgggggaacccactgtatgcccctctccagcatttggaattccacccgccttgctttaagacaaacagggctgctccaactagttttgtgtcagcttccagctctctgcagctatcctaattcagccagtaaggttcagtcttcttgctcaggctcctgaagggttgattctcctgatagatggggccccactgatctggatttgaaaaggatttctagaaattgggggtaagaagtactaccaaaatgtaactgctaatcaagggtgatgcacagcaaaagcaatggaccccatccctctaaagcctgccctcctttgccttcaactgtatatgctgggtatttcatttgtctttttattttggagaaagcgtttttaactgcaactttctataatgccaaaatgacacatctgtgcaatagaatgatgtctgctctagggaaaccttcaaaagcaataaaaatgctgtgttgaaatgccaatgaccttgtaactctgggtttccacacaaaaagaaatgtggcccatttcacttaagctcctggacaacagcattaacacaagatgcctctcttgtgttcagatgataaacactggtgccctggaagagtccccattctctgcccccactgcagggctctactggctagtgcccatgtagaaaaacacccttaaggttgttgtagctagtggagcgctcattgtgggcacatatttagaacgagagaaaatccaagcctggggtcccgtggtacagtggaggccggtcgctgagccagggctggggcccaccctgcatgcctggctcatgatatggctacagctcagggcctcgcctcgctgcatccaagagcgcttttttttttttttttttttttttttttttgagacagtctgttttgccaggctggagtgca

SEQ ID NO: 139630 - DNA, 1448 bp, Homo sapiens
agactggcaaaaaaagaaaattttgacaacatgctgcaggcaaagagaaacaagcagtctcacaggtggttggcggtccctgtccaaattctaagtgtgtgtgctcttggacccagtgatcctacttggagtttttcctacagatatatttgcacacatgtgctatatgcacagggctattgactgcagtattacacatgcatgcagcagaagaccaagcagctatagagaaaaagagttcctcacaccctgatagggaaaggtgtccattgttcaatgcaaaagcacagtgcagcaaagtgcatgggtagggctgggcagaggagcagggtaggctttttgatatattcctggcctctctgtctttccccacagccatactgcaccccagggcgggttcagtgccacctctgtccatcacagcttcccctgccagagcctgcatcccaccagtatcaggatctgctcaactgtccatctctgcccctggaactgtgtgcctccaggacgatgactgggtctggtttgttttgtccctgttaggtagcatgggcactggcctagctagtggcttaagagctggaacgaatgtgcataccctttggcttcttggccctggaggaagaagcccagctggagctgtgacctccagccagcactctggccaatgacctggactgaggtcccagtatgggcaggcccggagaaagtgaactacccatcgcgcacaacctctcctcacctgagtgccctggtcagtaggtgcaatgaacacaatgaaaggcgaaagttctgctgtccgaacaattttcagggtctagaaaaaaaaaagaagggcggcggggaggggggggaaggaagaaaaggaaagtgaaaaaaaaaaacctacatagctgtcataatggattccttctaataagcagctttgagctttaccccaatacaactttccatcattcccagtactactgttcttgttccaggctgaccccattaaaaggctgaagcaatcctgagcccccagaagattcccaaggagcactgtcttcgccatcccttgtgtggctgagcccatctgtccctgcccttccatgcctacccacctggggctcaatgtcaaggatggcaatcttgttctgcttatggatctggtgcactgtttcaaatttggtgccaaacatgttgccttggtagctgccaaactccaagaactcattggcagagatgttcctcgtcatctcctccgttgagataaagtggtactccttcccatcttcctcactcttccttggcggccgtgttgtatctgtgtacaagaacccaaatccccgacaaactccaggtcctcaccctttcatgagggcttggaccatggtgtctgtatggaaaccctagctgcctttggtgcattgactttaatacaggggttcctcccgtgggctcctgaa

SEQ ID NO: 139631 - DNA, 1050 bp, Homo sapiens
caagaaatcctgaccatagtctgtagatctgtttttaaaatattttccgctatcttcatttctaagtttcaatattcctagatttggtagtttgagagatgtaacttcatttagggaaaatgataataggaattttctatgttaggctttgccccttaaaaattaaatgtgtcctgggcagatggagggatttcctggtgtgcatcactttctagcatcagctcttcaggagcccacgggaggaacccctgtattaaagtcaatgcaccaaaggcagctagggtttccatacagacaccatggtccaagccctcatgaaagggtgaggacctggagtttgtcggggatttgggttcttgtacacagatacaacacggccgccaaggaagagtgaggaagatgggaaggagtaccactttatctcaacggaggagatgacgaggaacatctctgccaatgagttcttggagtttggcagctaccaaggcaacatgtttggcaccaaatttgaaacagtgcaccagatccataagcagaacaagattgccatccttgacattgagccccaggtgggtaggcatggaagggcagggacagatgggctcagccacacaagggatggcgaagacagtgctccttgggaatcttctgggggctcaggattgcttcagccttttaatggggtcagcctggaacaagaacagtagtactgggaatgatggaaagttgtattggggtaaagctcaaagctgcttattagaaggaatccattatgacagctatgtaggtttttttttttcactttccttttcttccttcccccccctccccgccgcccttcttttttttttctagaccctgaaaattgttcggacagcagaactttcgcctttcattgtgttcattgcacctactgaccagggcactcaggtgaggagaggttgtgcgcgatgggtagttcactttctccgggcctgcccatactgggacctcagtccaggtcattggccagagtgctggctggaggtcacagctccagctgggcttctt

SEQ ID NO: 139632 - DNA, 1050 bp, Homo sapiens
ataccaatatttttctagtaagttaatatttgagcaattgccacatgccacccattgcattagacttggaaaggacagcagtaccacttggtagcattttggggtttgagctaaacaacaaagaaacatggagcttgctggtgaaagaggagtactgagttctttgccttgctttgttattctttttagtgtatacatctgtgtcatagtctggagtcagtagccactctagttccaggaatttgaggacaaggtgttttattgtgctgttggactactgaggccaaggaggatgagaccatcttaaactgtcaagtcaaatgttttcaatcctgagtatttgacacaatctgtttcataacatgctgtaaatcctggtttctcttctatggtatcttgagttacattgacagctcctgtttgaacttttgttcttttgtggattgatttttcatttcatggcaggctcccttcacgtgggggatgagatcctagaaatcaatggcacaaatgtgacaaatcattcagtggatcagctgcagaaggcgatggtgggtattttctatgctagatgaagaccttccattgtctccataagtgttgatccacattggtatcagtgacctcatctctctgtcaaagtatttgtaccttcttgagggggctcttttcactgctagtctttaatctgtgtaagaaatgataattttctgcctttatttagtaaaattctaaagcagggcaaataacccagagcatcaatctggtgttccatgaagtaatgccaaatgaagtaaagcaagctataacgtatatagtagaatcccatttttgttaaaaacaaacaatacatatgtatgcataatgtatgtaaatatttgtaatgcttttgttggtatggggaaaggcgtggatatatatgcgccatagttcatttttaggaacttcttcaggactttttggggtaaagaatggggaagaaaagtcttttttttttttttttgagatggagtttcgctctgtcacccaggctggagtacaatggcgtga

SEQ ID NO: 139633 - DNA, 1018 bp, Homo sapiens
gatgctaacctgaattacctttattgctgtgtgaccgagagcatcaggttgttcaaggaaatacaaaggagaagagaacatgccagaaacccttggagcctgaggtgccgcaggattcagaatctttctaattttgttatatattatgtaataccccaagcaggatccaggagagcaccatgtaaatcaaggcacattaatatttctgcagcaacctagataaacatgtctattttatttatttttagagacagggtctcactctgttgccctgggactgtagctgggactacaggtgcacaccaccacacttggctgacatgtctattaagttggagaaataaagcttacaaacagcttcatgtcaattcaaataagaatgaggccaaacttatgaaataagttttcagagcctcttgaatgttagaattgcagattgtggactggctgtgggccttgctcctgatttcatacgttgctttgttgttttggcttggcaggctgtatcgcatccattgaatactgtgaccgaggacatgtacaccaacgggtctcctgccccaggtagccctgcccaggtcaagggacaggaggtgcggaaagtgcgactcatacagtttgagaaggtcacagaagagcccatggtaatcccccgtcatattgtcgcccaccagttactctctgccccatgagtcactgggccagaagagtcaatgcaagaggctgctcatggagttagggaattggccaaccccaaaattgtcttttcattcttatctcaaattcctcctcaaagcaggcttcatgcctgttctagttgaggactatcctgggtataaatggaaaatattttcctgagaaattaccgtaagttctttctaaaataacctcagaaagagcttaaaataaagcttattgtgccgtcgcctttatttcagggaatcacgctgaagctgaatgaaaaacagtcctgtacggtggccagaattcttcatggtggcatgatccatagacaagg

SEQ ID NO: 139634 - DNA, 1150 bp, Homo sapiens
cagcactttgggaggccgaggcaggcggatcacctgagatcaggagttcgagaccagcccggccaacatggcgaaaacctgtctctatcaaaaatacaaaaattagccaggcgtgttggcaggcgcctgtaatcccagctagctgggagactgaggcaggagaatcgcttgaacctaggaggcagaggttgcagtgagccaagaccacacccctacactccagcctgggtgacagagcaaaactctgtctcaaaaaaaaaaaaaaaaaaaaaaaaaaaacaaaaaacagaaaaaagtcatgaagttcctggaagtgaaggacaggaaaggcagactggctgagaccacaccacatactggggaaattgggcagaggactaaataatttgaaaattacactttactttctagtatcagttctgtgaaaagaaaagccttgaacggaaccatttcctttgcaaaggaaacagcaagatccaagtctgcagcgaaagttctttctcaggtgaaattataactagtcagaagcagagtcagtgatcatgcacaccgtagactcaacctcctgccatcgcagaaggtgccgcactcggcatgcaccttggtgtccgtgcacaggctgttccctctgcccaggtaccacctgccagttacagcctaggtactgcgaaatgcaagagcccactgtgctgggtgcccctccttgctccacagcgctccacagctgcttctatcacatcaccaccacactactgtatttgtttccatgtctgcgtccttccttatttgcctcttagttccagcagcagacctggagtaggcaacaaacaacactgcgtcacactcagtgaccaccagcggggagtaatgctgcatgtgatggcctaagaaccaagaaacaggttttcttggtggaaatttgcctggagcctgacttatctgttaggtgatttttttttgatgtgggataggcccaagagaattttcagggattctcaaccaattgcttcaggtcctggggaaagtgttgcttcaaacaggcccgaagagaaaagcagtattgggaattttacaactacttttatgtgcattaatggatactgctgtgaagaacaaggccagagagagctaataaaattagtttctccat

SEQ ID NO: 139635 - DNA, 1010 bp, Homo sapiens
tccccacgaatttggccagggcacccgggcggctcaggcccaacggggcgtgggccgtgtgctcaaccacccagaagctgggggccccctcccctttcttatctttctggcattcatctcacgcggccacctacagctacgacttcctcaggccctttaagggccgcttctcggagcgcagggagccgcggagtccggggcgtgggagacttccatgggcggagcgagggcaggagtgggcgggccgtaggcggagctccgtccgcgccctcccggcgcaccgcctgcggggcggtgactggcccagccgcaccgcgtctcccgccttctccgcagccccgcaggccccgggccctgtcattcccagcgctgccctgtcttgcgttccagtgttccagcttctgcgagatgaccctcaaggcgagcgagggcgagagtgggggcagcatgcacacggcgctctccgacctctacctggagcatttgctgcagaagcgtagtcggccagaggtgagcgggccccgctagtcccaagggcgctgggccggggctcggccattcatctcgggactttccctgtcccggtccctgtccccggggggcctgtccttgcgggtcctggccataggtcggagaccgcgatagccggcggggtgaggacaaggccagcgcgcggccgggttcgtaccgggctgctggtgcagtggatccttgcccccagcagtccttccagttggaaatcaggagaggcagcggcctggacagtgcgcttattaagggcaaggaaaacttcctcgtggacggaagtcagagtaacagaaagtctttaaggaacacatcaaggagtaggtctgcctggttgttgttgaagtgcttgtgtttgggtcagcagaaatgattgtaaaagccagcttctggttctaaagagctcactcactgttcctcttcatttaggcaggtccccttgtgctatggtgcaaagagggtggccagtgtatatttgcgggtgg

SEQ ID NO: 139636 - DNA, 1063 bp, Homo sapiens
atatatacacatgtgtatgtatgcaatgggctgaattgtgttcccccatcccaaatttataccttgcagtcctaaaccccagtacctcagcatgtgactatacctggagatagtgtttttaaataggtagttagttaaaataaggtcattacggtgggccctagcccaacaatactggtatctttattagaagaggagattaggacaaagatatataaaggagaaaccatgtgaagacaagggagaaagccatctacaagacaaggagagaagcctcagaagaaaccaacgttgcccacatcctgatctcaagcctccagagttgtaagacaatagatatctgctggttaagccacccagtctgcagtactttgttatggcagcactagaagactaatacaatgtatgtatgtgtttatatatgattatataattatagagaaaatatgtcttaaaatatgttacctgggcatggaatggttggtgaaaagatgtaatatagaaggagatagggaattaaaagggagagggaaatcaagtaaatattgaaaggaaaaaatggtgactggatttttaaaatatgggttatatgatcacgtgtgtttgagtaaaaattatacatttataggtaacataattgttaaatttatgtgcacatacaattcattcattatctggacatcactttgattacatcaatttttctttattcaccacccactggacttaagtgctgctttactcactgtgcatgatgttggaggcttggaactctggatcctcaagctgcactccagctggattggggagaaagcgttgtatattctctgtgaggtaccagcttcggttctcatcaaatacagaaaacaggatgacattcctcttgtctgacattatctgttaattacatatattgaaaggggtaaagaaatgctactgatgttgtcaggtaggagctagcagtctatgatgaaagcgatggcatgcatgtgatatatctaatccattggtttaattccatttcctcttaggcatgtaccagggcttgggagttgagggtggg

SEQ ID NO: 139637 - DNA, 1032 bp, Homo sapiens
taaaaaatgccacattcaggacagaatcttgtgccttatcccttgcaaccatcctgtcctcaaactcaggagtgtttttttttttcttcacaaacagttcctcaggtctgctccctccttgccatctctacctcggcccattggcattcacttctcttctggatcgctacctcaccgtcttaactagagtctctgccttcgtcctccccctttaatctcttctccacaatgtagccagagtcatcttttaaaaatataacctgagagttttaagggacttactcaagaccacaagattcatagagccaagatttgatttccttatgtcatgctcctcttggggctggctttatgtagggggtaggaaggagctaggtcatcttaagctaagtaagatatgaacattgccagaaatgcatgtttgtatgtaactgacagctcatcaatttgtctgatgttggtttgtttttgtaggtgcacaggtttcatattccagaaggttggaaagttggctgcaacagctgtgggaggtggattttttctccttcaggtctgtatgtgaaatgttctcagatgtttggaaattccacctgcccattaaggaatgtggtgtggggagttgtaatacagtcctggctatgtcacactagactagccttagcacttgttttcatgtactattttaaatgctagtgaccgtttgagtcaaattttattcattatactagtaaatgttatttgccagtcccattttatttcctcatgtggcgacagaagtgcaaattccttatcatagctcccttaaaagagtttttaagaccagctgaattattaagcggatgtgatttcaaaaatacaagtgtgctgtgatgatttagtgtcatatgctaatattatagctagctttcacagaggggatgttgagcatgtgatgagaaatgggagctaagtgacagtacagtcagatgtcgtctgctgtctccttgacccatagtttcagaaccagtggttgccagttctctgagactgctt

SEQ ID NO: 139638 - DNA, 1215 bp, Homo sapiens
tgggagcaggtttcaggggggaatgcatggatggagagatttaggggagagacttcaggaaatgagaagcctctattggagggtagatgccaaagaggatggaaggagcaaaattggaaacagaattgcctctgtaaccagtttatttagtgcagctttactctttcgccataactgtccccatgaactctccttctttgtccttgattcaaagagccattgtctctacctcctgatgtgcatcctccttcccatcaggctccctctagtcttattctccccacaccagccagtagtcattttcatatgtaagtctatttaattattattaaatagactattagtgtaagtccattgccctttgggtaaagtgcaaattacgtaaccgatgaggggattgacattgttaagactggcataggtataatagagatgattcttaatattattaacatccttagcaaaacaacccattgtactatcttctgttttcaggtggtgtcatttgtgaagaagaatgttctagtaactgggggatttttcggaggctttctgcttggcatggcatcctaaggaagatgacctcatgttcattgttcctggttttttccagccagcagcctctacactccatcataggacatcgagtccctcctcctcttctcccatgccttcttccctgccatggcaaatctgagtggcttctctaagcatctgctggtacaagtcaatgtggcaccatgagcttcatggtggcagaagagacaatagtccttagctctcctcccagtacaccccctacttggccagtctgtaggccaacaagaaggttcctttacccccatgcaagacacttatgagaacacattacaagatggctgaccgtggaggatgagtggatcctgaaaggttgtcccaaactgttgatttggaaaagaaataagcacatagataaccttattgtgtgctgcatggaaaggaactgaatacatttgcctttaagcatgaaagattttggtatcttggtgtctactttcttttttagttggttttacattacagaaagctatttaaatgtgttataattatgccgacaaaattggcagcataattactgtaattgaaaaatctgatattgtccaggaatgctttctaccgtacaggataatgtatctcatggctgtttccaaagggtttatttattgtaaaacaagt

SEQ ID NO: 139639 - DNA, 1109 bp, Homo sapiens
aatgtcattttatcatatttcagtatgtatctctaaaaggtaagaattatttctaaaaatcataaatacctcatcatatcagacattaacagtaattacataatatccaaaatctgatcagtgttcaaaatttcctcaagtgttttatatttagtttgtttgaatcaaaattcatgcaaggttcacatcgtatttgcatgatttggataagtctcttaaccttatagatcctcctctatttttttttttttgcttgctatatatttatatctctatatatattgatatagacatatgtagtgacactgagtcatctgtttcctgcttccccacactctgcctctcctgacatctgggtctctgggttatgccatatatggtgatagtggctgcagccactttacctgtgtgacttacccacagcaatgggatggtaacagcaaagctaaccaaagtgctctgtgcccctttgggttgcatgtggggagactggccacccaatgcctctccagtggggtaggggttgtcttttggtgcatctgtttttcctgtgattattggtgagggcagcaaagattagcaggtggttgtaaactaccttgagtaggttgtaataaatagtctggcctcagactgtattctgattgtctgaattaagatctgtaggtaggtccctcctgaagttttttcccagctggctgcctctacgactgtgagggtcatggttgaggtcagtattgcaggttggcctcatcctgctagtatgagaacggctgtgagttctgcccacggtgtgaggccactgtgaccacttgggattgtgcagagctggcatggaggttgaacacgcacagctgcacaccttgttttcagtttagctgaaccatcggtgaaggaggctcaggcatttggggttacctgtgaatcaaggccctattgtgccagcagttttgtttcaggtggtgaagtgggagttaaggtttcccccaaaagaacagctgccactcctccatgcaaaaccgagatgattcaaggaccaggcagctccacctttcagtgcactactttcatttgactggagaggcctgcttagctaggcacgtattttc

SEQ ID NO: 139640 - DNA, 1024 bp, Homo sapiens
agctgtaaaaaccggctgaatttgaccctaaggctgcagtttgccaattcctgatgcacagccttagtaggggaggtccaacaatcagcttaaactgtatgcaaaataatgtgtggtgtatgtgcattttcctaattcatcaaattagtgaccagtaataaaaatgatgttaaaaaccaatgtcctagaaaaaggtgcatacatgctattaaccttaaaggaaattatatattaaaatagctttcaaccactttgtaaatcatactttccctaacgaacctgtcgacaggtctctaaattagaaagaattcagtggactttggtatatcttctttcttccagttccataggtactgaaagtgaaaaggggtgggaagcactgatctaaacctccctgtaccttagtcctatgagatcatgactagagtctgcctgtatgtttttcagccaacagctacatggaatcaaagtgtcaggctgtcatccaagaactgcgtaagtgttgtgctcagtatcccaagggaagatctgtcgtctgttcaggatttgaaaaagaagaggaagaaaacctaacacggaagtctgcatcaaagtaaagttcttctgaagtgctgctccatgtttccaccaaatgaattttttttatcctcctgactcttcaggccaggtagcagcaaatagcaaatgaaaaagtcagctacaaaagttaatgaatatgccatctatgcagaacaggcagaaatataaacacattaaaagacaaatatgtagaatgtaatatactgagctgctaaaataaacctgtttaagagaaaaatttgggttttgtactaaatgtattttaagactattagatatagggtattaatgaattctcttgaagttcaagccactagtgccattcatcaaatttaagtcatatgaggtatgttaggtgaaaggactcacttccagcatcacaattttgacgcccttttttttttttttttttttttttttgagatggagtctcactctgtcatcc

SEQ ID NO: 139641 - DNA, 1049 bp, Homo sapiens
ttcatccactactgcagtgcacccacccttgggcctggggggagggagtgggttgaaaaactgctcaagaaacagaagtttagcaagggtcatgaagaatactgcaagtgaaactgcagagagaggttacgtaggcagaaagcaagtcaacaaaagcacttagtcaggatccgtaacttgaaattgactcctttggaaattgccatagaacccttaatggacatcatcggctggacctgggatctgatgaatcccacaaaagtcagcaccttctacagaacagatgccctgatcaccaaggacttggtactgatttagagagaagagagcagctcctagcagcatcaacatctatttgtcgcttatttgccctgcagcaattcacctgcctttccttctcccatcctgtaaatatcctaggttttgctccagtgtttcccatcccagtactgacctaatttggatctgctgagtatttagagggctctgaaaagagatatgcattgatgaaattagctacaaaggcttgtgggcctttttttctatctgaaatcgtgtcttcaaattactggaagttgctgatcaaaattgtgggctcttgaattcattctctgattacagatattttaaataagctggtttctataagaacttcaagaaaaaccattttagctgcttaactggcacctttctcaggaagtaataacaccaaatattgctgattcctaggaaaacatttactacttgtaaagaatttcctgagttaaagtagttataacagtttatatacattaaaagtaaggttttactttaaaaaaaaaagtcttgggaataatagctaccatgtattggagtcctttccaggcactattgtatgtactttatatactttatcacatttaatcctcctgtcaatgctttgaggtaggtatgattcccattttatatatgagtaataaaaaaagctcaaggagtttaatcatttatcaagggtttcttctgcgaatgatagagccaggctgcgccgtcggctcctctagcctaacgtt

SEQ ID NO: 139642 - DNA, 1347 bp, Homo sapiens
atttaaacctagtcctctatggaaaaatgggctcctgtaacatcctgcagaattattaaaataaaacaaggacctagatggataactttcatttgcactcactcagctccaaatcagcatgatccccaaagtctcttgcagctcagaaattccatgaagctagcttacttttcctaacaagaaaatccccttctagaaatgcccatccgctatttgtaaactttcttagtaaactgataaatagatcatttgcccttaaaacaaacttttaatttcaactctgaaagacatgcatatatgtccttcagaatcttaccttttaaaatggaaactgcttggaagtggcttttacctggggaatatgacatgcatgtgtctgttatactgccttcctgccaaaataagtgtgtctttaggcacgctctttgcatattctattgctaactacattttgccagacactgcttgtgaatgcagtatgtgtgagaccactgcccagcttcctgtagtgctagtcctacatttccacagaactcctcacctagccaaattcttgagcgctttgcagtcagcagcactacctgaggctctgcctgagtgtcactttagttgtcttgcagaaagcttcagatgtccttggttctatttaggttgtgcaaatagacatatgaggtttggttctggttagtggttgctagtaccagatcaccttgcttactggtgagttcattcaaacccaaaaagtcacacctgtgtcctgtgcgcgggtgctgcaggcttaggtggagaaaagcagggctagaattggaacccaaagcccagaatggcaggagaggatgtgggggctccacccgatcacctctgggttcaccaagagggtatctaccgcgacgaataccagcgcacgtgggtggccgtcgtggaagaggtaactgtttacattttgcttatttctttgattttgctttcaagtaacttggtttctattccagtctcaatattctgaagtctttggttttatttttgatcattcctttccattaggagacgagtttcctaagggcacgagtccagcaaattcaggttcccttaggtgacgcagctaggccaagtcaccttcttacctcccagctacctctcatgtggcaactctacccggaggagcgctacatggataacaactctcgcttgtggcagatacagcatcatttaatggtacacatgttgcttaattattttccattgtactgggactctcgtaacagagtactccataaacttttctttttctgacaggtcaggggagtacaggagctgttgcttaagcttttgcctgatgactaacct

SEQ ID NO: 139643 - DNA, 1022 bp, Homo sapiens
ctcccctatgcacagccccattacttcctccttctctgtgctcagagcgtggttgagacaaacgaggaaagcgtcagactcgagatgaaccgcctgcaccgcctgcaccacctgcaccgccatcttggcccgacccttctcacgtccgcctcgggcccacttggtcctgaccaaccgggtgctgcggcgcagcctccccagcgcccagcgctgtgcgctccgcccaggcctggccttcggcgcgcgggttcctagggggcggggcttagggagcgggcggggctgtgggggcggggctgtgggggcgaggagggggcagcgggcgcgcggctggcgcgcgggggcgggccttggggcacgggggcggggcccgcccagcagcacctgggaaacgcccgcgcggtttggggcaggcgtggccgtcggggcggagggcggtggccggccgcggtccgggcgtcaggccgggcggcgggggcggcagggaggcggcgctctggggccgcaggcggacgtactctgtgagcggcgcccgggcgcctgggcaggcgcctcccgagtaccggcgcccattttgcccgcccgctaaggagacccgtgcgcggcctacacgcttgggggacagccctttaagacgacatctccgcgaacgccggcctcttgagccagggggacgctcttttgaaagtcagtcccaaaacagttaaggttttattttattttgttttatttccaagtcacagcccccgaatctcgtacaactctccctggaccacttccggttgccggcccgcgcctcataacttcggttcgagtgacctcggcccgggatgcccctcggctcaccccgggctcacgtcgcgatcctggcttgagtggcccagggtgggagacctggaagttttagcctagctgttctcaaggcggattaattagcccaagaaacattatattcatgtgagtaaccttttgcagaaacagtgttatactgtatctgaaaaagtatcactcttaagcttggc

SEQ ID NO: 139644 - DNA, 1180 bp, Homo sapiens
ggcgttcgcggagatgtcgtcttaaagggctgtcccccaagcgtgtaggccgcgcacgggtctccttagcgggcgggcaaaatgggcgccggtactcgggaggcgcctgcccaggcgcccgggcgccgctcacagagtacgtccgcctgcggccccagagcgccgcctccctgccgcccccgccgcccggcctgacgcccggaccgcggccggccaccgccctccgccccgacggccacgcctgccccaaaccgcgcgggcgtttcccaggtgctgctgggcgggccccgcccccgtgccccaaggcccgcccccgcgcgccagccgcgcgcccgctgccccctcctcgcccccacagccccgcccccacagccccgcccgctccctaagccccgccccctaggaacccgcgcgccgaaggccaggcctgggcggagcgcacagcgctgggcgctggggaggctgcgccgcagcacccggttggtcaggaccaagtgggcccgaggcggacgtgagaagggtcgggccaagatggcggtgcaggtggtgcaggcggtgcaggcggttcatctcgagtctgacgctttcctcgtttgtctcaaccacgctctgagcacagagaaggaggaagtaatggggctgtgcataggggaggtgagtaggtctgttagcctggatggaaccctgctgagcagtcccagtgtgtccccggggtgggtgccggcagctcccagggctgcggaggccacaggcatcctcgatttaggtccttggacaccctttacatagctctgtcgcggggagccccgtttcttctggccgcctgacacttgtttagtctcctgcgagcccccggcggtctgtacaggccccgggagccttgccctttctcctgtagcctggggcttctctttagatctgcgcttttcgcccggttgaccaaaactgcaaggcaggtcagaaagacactggagtataatgaggatgtccgggtattacgacgcagcagctgaccacagttagagccccttgcctcgcctcgagtcttctgtctagggagcagagatatcaaccaaagcatttgaagggtatcgaagagcctaacagaaggtgcggggcttgaaggaagcaaaagtttccgctgcattgtgttgaggaggggccgaagaggatgaggaaa

SEQ ID NO: 139645 - DNA, 1047 bp, Homo sapiens
caatttgagatgaaatttgggtggggacacagagcccagccatatcagctcctatggcattgacttactacattatcttagtggagtttcatgaatgacaacttgccactcaaccatgtcgttagcacattgaaccctttgtcagtgctctgatttatattcctttgtgcaatacagtgttttgtacatagttgtaagtcaaataattactagttgatcatcctaaaagtccttccttgatttaaatattagcatatatattttatatttttgtgtctgaaatgtatatattgaggttgggtgtcttttatttgaaacatttcattattcgtgagaaaagtgtcagttttctaaaatggaatattttatctgatattataataaaatgcaattctatagttgaagggggatgtgttattggagagagctgtaagtaaccatttctgtggattttcctttaggttgatgccgtcagaattgttcacattcattctgtcatcatcttacgacgttctgataagaggaaggaccgagtagaaatttctccagagcagctgtctgcagcttcaacagaggcagagatatccttactggtcaatagaagcttttatgtgctctggggttcctgggccgcattgctgcttgctgcagtcatcctgctttaggtggtttcacaagttttcttcccttagatccaattgtttggtttttagaatttctctctatttctccttttgagtggcttttattggaagaattagaaattttctgacattcctgctcctaaatgccaaaagatctcagggtcaaacactgcgacaatgaactctgtgtggagtcccctccatcttcctccctagtcttctctccattcctccctgcccctccttccagttttcctagtatcatttaatttctaggccatttactatcttggtctctatcctcttgagagattctcttttgtgacttcctctcaaaaaatgcaatgctgggaactgaatgcagtgtttcatgttacatataaccccaaaatgatcaaatggg

SEQ ID NO: 139646 - DNA, 1065 bp, Homo sapiens
aacattattcccctgcctcagtctgcagctgaagaaatgggctaagagaagttaagtagtttctcttggcatttgaaaacttgaaaatatatcttagaaatattgtttctcagacttagttgtataaaaaggattattatattttaatataaataatttgcaggaaaactaatgagcattttacaggataacagcagcagtcttgaaagtgacaacttctgaagatttagaaaagcttttcagatagcacagtggtaaggattcgagtgatgaaacatcagctaaattaaacttgaggatgtaagtatatatggcattggaaaccatgtggattctagtttagaaattttggctttaaatgggcattatgggaaactcagcattaatcttatttcattcttttgttgccattaaattgtaataagcttattttaaacttcagggtgctttctgagcccttattagcatcataaattttgttcccacatttttaaagtaccttgacagacacacaggttggctgaactgacaggccgccccatgagagttgtgggctggtatcattcccatcctcatataactgtttggccttcacatgttggtaagtatcatggggttgcaatgtttattgttttcagaaattaatatcatgtttccttttccattacatagggtatggttattttaaaccaaaatttgactgtcctttagcagatgtcattattttgatttattttattatgtattaaaagtaatgatttatgtcatattgattgtttttaataagtctgtcagttgatataaaaaaattaaactgttaactgaaaattgctgattgctgaatatcattactgtccaggacactcccattctgcagacttaaagatattaaagggtaaaatttgcaaaattgatttttacagttgctgtttacgtatagtccattggggctctcaatatacatctttacccttctaatcagtgtaatgtaactaaattgctttctttctacctttacccctttttgagaatcatggtgggtttttttgtccgtatctgcgtctc

SEQ ID NO: 139647 - DNA, 2794 bp, Homo sapiens
cttctctattctttttctttccctataggaaagatgaaaatatccagtgtaaagttacttaagctaaatcaatttcaaagaagaaaaacttggaggactcattttacctgacttcaagacttactataaagctatagtaatcaagatagatggtattggcagaggaacagacacatacgtcaatggaacagatgagagaacccagaaataaacccatataaatatgctcagctgattttgaaaaagtgaaaaagcaattcaatggaggaagaatagcctttctgacaaattatgctagagcaattagacacccatggcgaggagaaaaaagaacctctacttaaacctcacatcttatataaaatttaactcaaaatgtataacggacttaaatgtgatacataaaactagataactttgaaaaaagccacaggagaaaaatcttcaggatcttgggctaggtgacaagttcttggactttgccccgaaagcacatccataaaagacaaaatctgatatattggacttcttcaaaatttaaaaacttgtgatttaagaagaggaaaagataagctacagattgagatgaatttgcaaaccatatatctgatcaatttggaatatataaagtgtactaaaaactcaactgaagtcaggcatggtagctcatgcttgtaatctcaccactttgggaggccaagatgggaggagtgcttgaggttaggcgttccagaccagcctgggcaacatagtgagactcttgtctctacaaaaagtttttttaaaaaattaactgggcaccatgacacacaccagtagtcccagctactagggaggcaggaggatcacttgagcccaggagtttgaggctgcggtgagctgtgatcacaccaccacactccaacctgtgtaacagagtgaggcctcatctcaaaaaaaaaaaaaggccacaaaactcaacaataaaaacaaacagtccaattagaaaatgggcaaaagacatgaatagatgtttcactgaagaggatctatagatggcaagtaagcatatgaaaagctgttaaactccataagtcatcagggaatgcaaattgaaaccacagcgaggctatgacttacttatctcaatggctaaagaaaaaatagtgaaaataccaaatactgatgaggatacaaactggatattttatacattgctgacaggaatgtaaaatggtacagccactctgggaaagagtttatgaatttcttatcaagttaaacataattttttaatcaagttaaacataagacccagcagttgtgctcctggacattcattccagagaaatgaaaacctatattgtacttgtactcaaatattcataggagctttatttgtaatagccccaaactggaaacaacccagatgtcctacaacaggtacatggttaaacaaaccatccataacttggaatactgctctggaatgaaaaggaactaactgttgatacaagaacttggttgtacctcaggggtattatggtgaacaaaaaaaaaaccagtctcaaatggtcacatactgtatgatcgcatttatataacattcttgaggtgacaaaattattgaaatgaagaacagattaatggttgccagggatagggactggagggggtgtggggtatgtatgactataaagggatgacgcaaggagttcctttgtgctgatggaacagttctatatgattatgatgattacgatgttgattataacatttgattatgaggttaagcacatgagtctttacctgtgctgaagttgtatggacctacatacacacaaatgaatgcatgtaaaatctggtgatactgaataaagtctgtggtctagatagcagtataatattattgtcaatgtcttggatgtgaagttgtgctatagttacaaaaccgtaccactggaggaaactgggtaatggatacatgggactctgtactatttttgcaacttcctataagtatataattattgcaaaatgaaaagttgtaagttttaagtaaggaactgggacgtatggtacctattttatgaaataagaaaagggtgctagaaaatttgaggggaataaaacgattggaatatttttacatgccaacctttagcacaagtccttttccctttctgggtttcattttctttaggtatagaatgagattagagtagttgaccaccaaggtttcttttagctcagtgtccagtctttaaaagtgttgagcatcacaagaaacagtggtgtgaacaggatgtatcattattttcccagctgcaccaatctggcttacctttacacaaccctgtatccccttatgaacactagattctctattctcaatcacatccaagactctcatggtaactgtatatacttgttctctctgttttcttatctcctataatttcaactcattgccttgtgacctctgtccacagcacttcattgaaactactcctgccaaagtcaccaatgagctccatacagtgaaagtcaatagttgcttttcccatccttgatgaacctctcagtattgacacagttggtcactcctccttgaaatctacttccttggtttctcttattttcttctctggctatccttcctgctatccttttcttctctagctgttccttctcaaattcattcatagacttctctatctttgcatacctatatgcagttgacacacaaatctgtatctgtccacgcctctatctgaactccagacctacatttccacctctctactggacattt

SEQ ID NO: 139648 - DNA, 1080 bp, Homo sapiens
tctgttgcccaggctggggcgcagtggcatgatcatggctcactgaagcctcgacctcctgacctcagcctcccaagtagctgggactacaggcacgcaccaccatgcctggctcatttttttgtattttttttgaagaggcagggttccaccatgttgcccaggctggtggcaaactactgggctcaagcaatccacctgcctcggcctcccaaagtgctaggattacaggcacgagccaccgtgcctggcctccacttggctgtcttaatggcacataaaaattaatatatctaaatctgaaatcatggttttcaatctaaactatattcccttccaacatttcttacctcagtgaatagtgaatgtaacatccatttgcacaaaccagaaaccaaatagacattcttaacatctctctccatcaccttctaaactatttatattgataaagttacagcgatttgaaattctttttctagcctagtaatctgagtaatttgtaggataaacatgttgggggaggggcaggtacatggaggtgtcaaagtgcctgatggctgaggaagcaggctgggattactgcatggaggtgtcagagtttccagctttgtggctccatggttgggtggaggggcagggggagagatccagtggaagccatgttgtgccagtgccctcagggcgaggaggcagccagcagtgtgctacattaagcaaataactaagttgattgagtgaagaagtaaatctgttgaggaaaatgggagctaggtttctcaatgtcagagaaattatttgaaaacatggaaaggccaggcgcagtggctcacgcctgtaatcccagcactttgggaggccgagacgggtcaggagattgagaccatcctggctaacacgctgaaaccccatctctactaaaaatacaaaaaaaaaaaaaaaggttagctgggcatggtggcaggcgcctgtagtcccagctactcgggaggctgacgcaggagaatggtgtgaacccgggaggcagagcttgcagtgagcgaagattgcgccactgcactccagcctggacggcagagc

SEQ ID NO: 139649 - DNA, 1180 bp, Homo sapiens
gtaaaatgaatctcatggtattggattaaaattggaaaagagttcattaatatgaactcttgttcaaaggaaatatatatatatatatatatacacacacacacacacacacacacatatatacacacacacacacatacacacacatatatacacacacacacacatatatacacacacacacagaaaccctatatatatatatctcagagctgagaaaggtatgtgtatatgtacatatctgtctcagctccgtccaccaagagggactagaagtgacacccagtggttatgagcacagctagcaccaagatgctgatttccaaaccctccactaaaaatggaattgaattgacagtccagaaataagcccacacatctacagtcaactgattttcaacaagggtgccaagactatgggagagaatagtcttcaacaactggcgaatggacaagtggatatccacgtgcaaaataatgaagttggactgagatcccacacgataaatgaatattaactccaaacgtattgaagacttaaattcaagagcttaaacaataaaaactttataagaaaacagtagtaaatctttacgatcttggtttttacaatggattcttagatatgacaccaaagtacaagcaacaaataaaaaatagataaattggaatttatggaagttagaaaattttgtgcatccaaagacatgatcaaaaagtgaaaactcaggacaatggcagaaaatatttgcaaatcctatgtataagagtctagtatgcaaaatatataaagaacactgaaaacaacaaaaaccaaacagcacaattcaaaaatgggcaaaggacctaaatagaaattttccaaagaagacctacaaattgcgaagaagcacatgaaaagatgcttgacgttactagtcaccagagaaataaaaatcatgagatatgactttatactaaccagaataaaaatgtaagagaataacaagtgttggtgaggctgtggagaaattggaactcttgtacactacaggtaggaatataaaatggtgtagacaatttggaaaactggctgatggctcctccaaaacttaaacacagaattaccataagacctagcaagggcatttctaggtgtatatcccacagaactgaagacagaaatttaaacaaaaactag

SEQ ID NO: 139650 - DNA, 1046 bp, Homo sapiens
cagaaaggcacagaggctgaaccctcgtgatggcgctaggtcccaggttcgctagcatccgagagaggggattgggtcgctccagaggccattgcgaaggctgctgccagttctagggtcggggtggggtcaggctaggtccctattcctagggctttagcaccgctcactcacaagaccccttttcccaggaggacgtatgggtttttcctgtcgctccagcttctctttcgcggcccttccacgcttgtcacttacctgagcgcagccaatcagcacctagaggttgggctactttcggccaaaggagaacggggacttgtgggggacgctccctgcgcaccaatgaatgtgcatggagatggagaggcgggcctgcaagtgcgaacaagccaatcacggaatcccggcggccggcggcccgggaggcagtcgcgcgctcgcatccccaagatggcggccgttaaggacagttgtggcaaaggagaaatggccacagggaatgggcggcggctccacctggggattcctgaggccgtgtttgtggtaagaggcacgctgttccctggcatcttggcttgaggccttggactgcccctttcttcccggctcccacccaggcctcgactgttggaaggagctgagccaagtgttcagggagggggcgctcggtctgctctcacccctcgcacctggacagattgagctctgctgggggcccgcccggaagaaacgtagctcgagaaggccgtagaagagaacggggtgcggggccgggacgaggggcgaggggcgaggggcggcgggtggcagggcagggcggcctgagggacctccgggctgccgccggttttcgtccccctgctggttggaaaaggggaggtggtgaggagctctcgactcagcatggatgctggagacacagtacaatgaataggcagaacagccagtgctaagatgtgaaaaccgggaatatcactttgtctgttgaaggaatgcagtggtctcgggaatgttgcctcgggaaatggaagaagagaccgatg

SEQ ID NO: 139651 - DNA, 1058 bp, Homo sapiens
cctatttttgaataaaaaatgaagaggaaagtgaaagaataaattagctatataatatatatgtaccatctgaaattgtctctaactttttataactacaggttgagcatcctaaatctgaaaatctgaaatccagaatgctctaaaatccaaaactttttgaacaccaatatagtgctcaaaggaaatgctcattggagcattttggactttggatttttggattgaggatgctcaactggtataatgtaaatattccaaaatctaaaaaaaaaaaaaaaatctaaaatccaaaacaattctggtcccaagcattttagataagggtgcttaacctgtacttttagttaaaaacaaacctttggagaaaaacaaagcttttttttcttctatgttttaaaaacaaagcagtcaaaaaatctgagtggcatgaattctaaaatttgtaaagtattatttttgatattaaaggaagatgtagattccttcatgaaacagcctgggaatgagactgcagatacagtattaaagaagctggatgaacagtaccagaagtataagtttatggaactcaaccttgctcaaaagaaaagaaggtaagtgtaaaaatttctaagttttgaaaatcttatatgacttgaacttttaaaaaattgagatataatttacatataataaaatattcagatgtcaagtgttcagtcctccaaggtggctgtaccatatgaaattcccaccagcaacgtacaagagttccagttgttccgtatccttgccaacacttggtattgccagtctaaatgtggttttgaaaacataatagaatggttgttaaagactgtattccaaagctttcaaaatcataacgtcttatatgtctagttcatccttctaattttgccagtgagattagagacccacagagtctgggcataagacttaattagttatgaaatcccaagatttcataactaataggcataggaaaaaagctatccttactctcaactctttatttccctacattattttatatagcttataaagtcaattcactg

SEQ ID NO: 139652 - DNA, 2582 bp, Homo sapiens
ttggaaattctaaaatacatgcagaagaaaaaagtaagtgcatttttgtttgtaaatatgagcaagctaggatatgtcagcagaaactcgtcttctttgactctttggtcactgatatttgatctgtgctgtggaatccagtctgccttcttaagcacatacactaatgttatgatgtgcttctgtagcaaatgtggctttgtggccttcccccaaaagtcaagtttaattctagggcccacacttggattactttgcttatctttagtgcttgtgaaacttaaatgcaatttgaaattgttttaggtgtacaaagaaaatgtcttattctgtgctagcagcatctagggttttttctttgttgttgtctttctccctaagaataaggagttagtccaagatttatagagctggaacgaatcttagagatcatctgttacaggttctcatttcatagttgaggaaatggttatggagaggttatactcgaccattgtctatgtagttagttactggcagaactaaatttgagagtcttctaagtcttaatccagtattcattaaataaaagcaggttgtaaagattaaatctcataagcatattgtatttaaaagattgtgtgtatgcttatgattttgcttgactggtagaataactatttctagtacattttaatatgtggtgaactttgtaagacttcagcaactgattgattgggcatgaagcaccaatgaaataatagaagaatggctaattcttacaataatgccttctctgtatgtcaggcactcgggggtgtgtgtgtgtctgtgtatactcagtgcttaccactgacttcataggtgtagggactgttgtaatcctcattttacagatgaagaacctgagatatagaagttaagtgagatgccagatttgtacagctagtgagtagctgagccagagtccatacccagccacctgggtctagcattcatttcttttaccactacacttagcctgcatgatggtactgttttaaatgtcctaggttcaactgtgcaatctctcctttataaccttggtatcaaactggcctgtttatggtactgtcattttttttttttgttttgaaggagtccaccaactcaatggagaccagattcttgctggcagataacctgtattgcaaagcttcagttcctcctaccgataaaatgtgtctgtggttgggggtaagtaaatgttatagccacagctgatatatttgtaaaccagtgtgttttctgtagcaaacacactggttttgctagtatttgctagtattttagtagtattgctcgagatatgtaaagtgttcatctccttttgattgtggaagggacaaagggacagagtccaagtggttcatattagaaattgactagaatcagaagtgcgatgaagatcgcagtaaaaacatactgaagtctctcccaatcaagataaaactgatcaaacaaaccctgcttctcttccagttagtgctttatctctcttaaatataatggaggaagagcaatagaagtaaaatagaaggtactgctgaactttagataaacgcttcttcccataagagtttaataattctagaaagatccctctcaatttaaggggaaaaagagtattgcaaaaagtttgaggttagagtttattttttaaaaccatgtatttcagttttagatgatttcattgagcttatctgtgatttacctattttgctcttctcagtcctctgactatccagctacctgtctgtggatcttgttacctcaggcaagttctcatacaaagtagcaagccaagtgtacttctaccagctgtcctacggggaggatttcccctagctgctgtcctgtaggatcactctggagaggcactctagattagcccaaggaggtttgctcaaagtttgtacaacatttatatttcactctacaatctgcatttcagtatttatcttttataatttatcactaaggctttttaaaaaataactttgaagcatagcaactacacctgagtgtccaaggattcaatgattttctgtattcagtttttttgtagaaattgcatgaccttttgattcacaaattcaagtgttactttatttcaggaaagataatttctgttgtgtacttgaatgtgacttttgccccatttcttttattatcttttgggaataataaatatgcatatgttcgatctcctttatctgttttcagtacctatcatgttctctgttttcagttattcgatgtgtttcattctgtgtgatttcctctggctgcttccccatgactttgtgttttccctggtagttattctgttttgttgcttttactctgtctttcgtaactgttcttctgtttctctttctcttcattttctttgctgagctcttcttgctcttttcatgtttttcttctttcattcctcttgaatgtttaaatcctcatttcaccactcatagactggcacttcccacaatcttctccatctcagtaaatggcagaatcttttgcctggttgctcagaacaaaaatctttgagtcttctttga

SEQ ID NO: 139653 - DNA, 1721 bp, Homo sapiens
agggtacatgcatccctgaatgttggcagtaacactagatcttcagaatgacagacacattaccttgtcttaatccctaacatctgtcagaagtagtaggaagggacaggtaaaagctagctgtcttttttacctggtcaaatatagatgataataaatgtctttgaaaaattttaaattaatatcatatctcaagctcagaatttatttaaattgatacaaacaacactatttagtttcacgatggaggtagtagaaagataggattttgtatctaaacatactggtttcttatcctgattctcccatttacccactagctatgccagctaaggaaacctgagccttcatttctttaactgtgaagaagacaactttggcctcagcagggttgaggattaaatgatacaatgtatgtaaatatattctttaaccaaggggtcagcaaactttctgtaaaaggtcaaatggtaaatatttttggttttgtagatcacatggtctctgtctcaaccactcagttttgccattgtggtatgaaagcctgagtagagaatagctgggctccagtgaaacttaacttacaacaaaaggcagcaagctggatttgacctgagggctgtagtttgcccacactttactctaacctataaagctctgtgtaaatattgagtaattgtcatgactttctctcttcaggctaatgtaatgcttgaatatgatattgatgaagctcaggcattgttggaaaagaatttatcgactgccacaaagaatcttgattccctggaggaagaccttgactttcttcgagatcaatttactaccacagaagtcagtatcctttcttaaaacaaaaagcaagggaaaaaaggagaaagatttttttaaaaaaacattctttcatgggcagagggagagcattaggaaaaatagctgatgcatgctgggcttaatacctaggtgatgggttgataggtgcagcaaaccaccatggcacacgtttacctttgtaacaaacctgcacatcctgcacatgtaccctagaactaaaaaaaaattagaatacaaaaaacctcccacattctttcttacattgctttagtgggaagaatttccttattaggctaatataaaggttatagattttataagataataaataagatattcggaactagtacttaaataagtttgtagatagattagtgattttgaaatgtgatgtggaaacagcaaattcacataggtgagtaagtatttttcttccaaatattttcccaagacaactttataactggttaaatagtttaatttcacaagcatttaagggtctcctatgttcctgcaactgtgctaagacatatggggcatgaaaatcaattttagaaaagagtggcagtgcctttctctggtagaactgtacatgtaaaacagctgaatgataattcatagcaaactataagtaagttaacatatgcaacaccaaggcaatttaaactttgggaaagatagatgtaggctggacttagttcaaagaaggctttgttgagaagataaaagttaggctgcttttttaaaggcggcgtagggtttaaagatcagcagagagaagaggtgggagtggggtattctggtcaagggggaaggcaagctctttgcctttcttctctggcctgtcttttcctcctacttcctgtcacagtcactcaagacaaaat

SEQ ID NO: 139654 - DNA, 1033 bp, Homo sapiens
gttaagcagtaagtcatgaaactccacttatagaagacaatagcaacagaggaccactaagtcctaaatataccaaagaaaaacaagtttacaaatattcaaactgtctgtcttctctacctctaaaatggtttaaccacatcaagtgagagtaacatcagccgattagaaagggaaaaagtaaactgtgctagcgtccggcattcagcttccatagcatgtctcacagttttcggccatttcagctaagagttttcttatgacaggcaaaaataatgattaaaataccattagctttgctgagaaatgtggaaaaaaaaatcacaatgtcaaaaatatttgaaactaattttgtttttataaataaataaaatggtgtttatcttttcttaaaattcttgctgttaaaacattcaaagttatgtcaacctgtaaggataaaggggtatttaagataacatgtttggaaaactaaaccacatttttaattgccagcattatgctttgttcttggtagagtcatccttgtttcttctttttacatcccaattataaaccctggccatatctgcaagaattgtcaaagaaaatgcaaatgcaattctaaagataatgcatgcaatgactaagtattcactccactcacacaatgaatcaaagacacagaaatgaaacatatacaaatactggtaacaaatagtattgtaagacatcctgctataatgtcaattgttaggaaaatactataattaaactctatcaaaactaaggactcaaattaattgttaacccattgtttactatggtattagtcaactgtcagctagtcaactatgatatatttaacaaatatgtactagacactctcgatagttttaaagacagtccctcatccaagaaatctgaaagatcactcaacccatatcctgccatgtaatatttatattattacaattatcaataattttatctcttaccctccctttggcttaacaagtttattaagcatctactgtatttttgactaggcact

SEQ ID NO: 139655 - DNA, 1738 bp, Homo sapiens
atagagtttaattatagtattttcctaacaattgacattatagcaggatgtcttacaatactatttgttaccagtatttgtatatgtttcatttctgtgtctttgattcattgtgtgagtggagtgaatacttagtcattgcatgcattatctttagaattgcatttgcattttctttgacaattcttgcagatatggccagggtttataattgggatgtaaaaagaagaaacaaggatgactctaccaagaacaaagcataatgctggcaattaaaaatgtggtttagttttccaaacatgttatcttaaatacccctttatccttacaggttgacataactttgaatgttttaacagcaagaattttaagaaaagataaacaccattttatttatttataaaaacaaaattagtttcaaatatttttgacattgtgatttttttttccacatttctcagcaaagctaatggtattttaatcattatttttgcctgtcataagaaaactcttagctgaaatggccgaaaactgtgagacatgctatggaagctgaatgccggacgctagcacagtttactttttccctttctaatcggctgatgttactctcacttgatgtggttaaaccattttagaggtagagaagacagacagtttgaatatttgtaaacttgtttttctttggtatatttaggacttagtggtcctctgttgctattgtcttctataagtggagtttcatgacttactgcttaacgaataactaactactatgatattctggacattttaggaaatggtaatttgccttgctacacattaagagggctattaagactacattttttctaacctcagataagtgcagtgtctttgcaatgccaacataagggagatcttggccaacgtgaaataaaattactcattcaaaactctgcctaaggtgattttgtagttcttaacagttctccagagcatcttgaacaggaatattaagataaatgtgaatctgcaatggctgaaaagagttgtgagcttttttattcatgataaaaccttataggaatagtataaaaaatccctgtggaaagctactagtacattgaccagcgctgggtgatacagattctgataaaaacataaatgtattagttcatctccatgtagtaaaaagtatacttatacaatgttttgtacttgtatttcatgaaattaaaacagtgatgctaaaactatggcagagcacttttttcatgttactctttgtcttactatgtttgggctgctataacagaataccacagagtggggggcttataaacagcagaaatttatctctcccagttctggaggctgggaagtccaagatcaaggtgctggcagatttggtgtctggtaagggctgtgtcctggttcgtaaacggcaccttttcactgtgccctcatgtggcagaaggggcaaggagctcccttgggcctctttaatttggcactaatctcatcatgagggctctgcccttatgacctactcacctcccaaaagccccacctcctaataccatcaccttgggggttaagattttaacataacaattttggggtgacacaaagattcagacaataacacctttttaaagttaacatgggtcttttcacgtatttgtaaagtttacttgtacatatactagcatgttccaagaacaacttatatttctagaaacaccataaaatccct

SEQ ID NO: 139656 - DNA, 1001 bp, Homo sapiens
gtaaattttaagggtcagatggaaacatttctgtctgggttaggtgaaagacaatcagccaggaggtccaagtagttaatctccaaagttccttaataaatggatctgaaaacgtttttctcaactcaaaaccaagtgatgttataaatttagtgaacctatgaagtcattgcagagtgcaagcttttaaggcttgtagcccaaactaggcaataactaaaagtttcattttcacactttttattttgaaattttgtaactatgaccagtgtcatcgttaggcctgctaattaaccatatttcctatatattcatactcttttctgtactcagggagaactgcttgtatgaccagttgtgagaaggtaccagtttgagattggaagtgtccaaggctggagaaattgattcacgtattatgtgcacagagttgcttttcttgtttggttaggagaagatggcccaggatctcatctgcacatgaaaattcatatggattatgccctaaagttcaactagagaatatacttgtgtttgtgttcctctcttgtctgatgtcagatttagctgtagtcacgtcaaaaaggatagacctggtgtgcacagtatttttgagcagtttataaaggatcatgcctcttgattatggttttcaaataattttatgtgttagttgattgtgtgacaactctatttgccttctgtggatatttgatatacaggtaggcaatgaccaaataggattttttttccagattttccaagtacacccatcttagactgaatcagtttattttccctagatcaaagctgtggattctagagtaaaagtaaaaaatttaaaggtaaaaggtcagtggataacaatctcttgcatttgtctatttttgcttgtattacctgtgcttttagagtcatatcccaaaaaatcattgcccaggtgaatgttatcaagctttttccctatgttttcttccagtagtttttacaggttcagaccc

SEQ ID NO: 139657 - DNA, 1019 bp, Homo sapiens
aactacaagtgaactgatcatcttctctatattcatttcacaagagctggcttaggtggggtaattaaattgccaccttcgtggttgtaaaagacaaacaaaacatggcaaatttcattaacacaaaatttcatcaactgctatactgaattatgtttagaagattctgaaagcaagattatccagtgggtaaatgagagtcgactggattctgtcagttcaaaaaaggaaagaaacaaaacttccctacaattttcttcactaaaatttattatatgtacagtattcccactcctggcattttctggcaggtttaaaaatattcagcataaatccagcagaggtggctgagcttaattgcttaaataagttctagaaaatttaaaaatcattttagtagaattcagtaccattgtcactgcaataagtgggttttagaaaataagtgtgaaaagaatcaggtgttaatataatactaaggataaagctttagaagctattttactacataggtaaagaaaagataaactaacttgtaacaaagaccacaactgcatgttggattagattgtctcatatttcagaataaaatgtactgtatacttttcctcactttgttgtgcactgtaatgaaatgtgaaaaatgctttatttagctgtatgtgaatgaaaatatgcttgtatttagtaaaatgattgattatgtgactgtgagattccaagtgtgtgttatagctatttccagaatctgttactacagcgtagcaactactaccaaggatatcaataagatgtgacatataccatacacaatcgtattcaccattaccttaaagccagaaagagaatataatttttgaaagttatctgaccatcatatcaaaagtccctgggacctcaatacttcctggtgagcatatgccactttgagaaaagttggttctgtcaagcctaaatcttcatcatgatgatttttaatcaagagtcttaattctgttgccaagtagttgattacaact

SEQ ID NO: 139658 - DNA, 1028 bp, Homo sapiens
gaaaggaaggcaatcgacacagttattagcacatttcagaaaatgaacacccttgtgatagaattaccagctgtatgaaacaaattgtcccatgcaaattaccctataactaggaaagagacactataacccaaatgccataccccctttttcctttgaccatgcctggggtttcaatgccttggcacctgcaatctggaagtaaacagtctgcttgcttcttcaggcacgtgacagtgacaacacagtgactgcctctgaaaagagccctgaggcaaacactctctcctgctgaacaggaggcactgtaacccttacaaacagcttacagttacttgggctacttatttgatcatcataacaggcctacgaggtttttgccccattttacagaatagtaaactaagagccatgaaaatcacttggccagggtcaaggactcgtgactcctagctcttttcactgcatcatactgctgtcagatgaataaatgattatgaatttgtttacttgggaagagatatgactataaataaatgttctctacatgttaggatatgttttccttattgattacaactcagctataatcctgagggaacatgggaaggaatcaaaggtaaagcccattcaggcattattgacaagagggctttaaacaagtgaataattgcacaactaaaaagacattagaactgtgtgggctataagtgttcttatcactgagacacagtggatttttattgaaaggaaccacgtacagcaatgcggagtgggatagggataaaatacccaccccaaaatgaccttggccacctgtctgccatatacgtacactgagttcctgtctacccaagagagtcagcccttaattctcaggtgaacaaacagctaactgcatcagcaaattggaatggctggcttgaagtttccattattttcttgaagagaggtgatgctttaaattactttttggattgtagccagttcagctaggcaaaagccatacttttcacaattaaaaaaaa

SEQ ID NO: 139659 - DNA, 1046 bp, Homo sapiens
gccgcccagctccagctgccccagctgcccctggccgcgctgcaggcgcttggcgaggccgcctcctgccagctgctggcgcgcgactacaccggcgccctggcggtcttcacgcgcatgcagcgcctggcgcgggagcacggcagccacccggtgcagtcactgccgccgcccccgccgccggcaccccagcccgggcccggggcgacgcccgccctaccggccgcgctgcttcctccgaactccggctcggcggcgccctctcccgccgccctgggcgccttctcggacgtgctggtccgctgcgaggtgtcccgcgtgctgctgctgctcctcctgcaaccaccgcccgccaagctgctgccggagcacgcccagaccctggagaagtactcctgggaggcttttgacagccacgggcaggagagcagcggccagcttcccgaggagctctttctgctgctccagtctttggtcatggctacccacgaaaaggacacggaagccatcaagtcgctgcaggtggagatgtggccactgttgactgctgagcagaaccacctccttcacctcgttctgcaagaaaccatctccccctcaggacagggagtctgatccatcccattcacccagtgacttctttttgcccaggccgggactttttgcatcagtcacgttaaccagatgactttgcctgttaccaaacctcatgcatccacgtttgcgtctggggaggaataaaaagacatcgttcccgcttctgcgttttgttattcctactgccgccataggaattatttcgttggctgaacgttaccagcaccccgagaacacattttgatagaatcagagtagaggacatggctgtcttctaaaaagccacgacatgaaaatgacaatccctttcgtctccttcctccgctgcttccacccaacgcagcctcctgcctccgcctttgtttcatagtgaggattttattttgcacggcgccctccctctaaatacctaccctagatgatttcatcctgcccctcacttcttaaca

SEQ ID NO: 139660 - DNA, 1115 bp, Homo sapiens
tataattatactgatcaagtatacaaatggtaagtatttagacatttttagagcatttcacattgctgctttatccaagtgcatcatttcgtattttacaaaagtccatggccgattggaaattaaaaaaaaaaagttccttcaccacaaagagttgagaagcactgctctagagtgtctcaataacgtttttggtcaggtggcatagtttcccttcttgtattacctttgtcttcctcagagttggcctttaagccaaggacctggctgccttccaggcagtcatttcctcatagtttaatagctatagccagtgaactgaaagtgcatttcctgccaccatactgtaaaattattattaatgtaataggagaatgcacttctggttttggcactgatatttgggatactgcatagggctggtagcttaaaagagtgggcaatattttggagtatggattaatggagatagaaccactaggaatacttcctgttaaaatatgctatatttgccatttagagataatttaataatatgatattttaaatgaaaataggaaaatcttttcttttgtggggccatgaagctttgctcaaaggaagttttaaggaggtgggtcttagctcattttaagagctaagtactaatggaatagtttctaactactgatggaatagttttatcaggtaaatgctcaaagactgatttacaaactatcattggttctctaataatgaatcctgcaattagttgaaaattagattaagctctagggccccttccaaagcagaattctataattatgtgctgaagtagatttaggcatcaaaggaaggaaaattaattttgaatcagcagtcattaagtgtgacgtcctgtgattctcctttaatttagagaaaaattctgcgatacttcaggaaggatgtaatactgaggtcatttgagggctgaaagtttacttggagtcgcatgtggtcccagatccacagtttggagccaagaggagacaataaaagatttaaagaaagagtaaatggaaatacagacagaaatagaaacatatagtacctggaaaccttatgtgtggagtgaacactctcagtagccttct
